United States Patent Application Publication US 2019/0144922 A1 - sequence listing, part 8

SEQ ID NO: 3 - DNA, 5315120 bp, Klebsiella pneumoniae (residues 3,543,415-5,315,120 of 5,315,120)
tggcggcatcggcggtcatattgccgatcaccatcagttcaggacgccccctggttttcaggttggcgcggtagtcgagcacctctttaagggtaatggagggcagcagcgcccggcgcacttcgcgctggaagtacggcacctgcgagaccatctggatcggcattatcgcctgatcgtaggctttgcctttctcggcggaatccatcatctgcgcataccaggatttggcctgctccagctgctcctcagtcggcgtatagctgaagtatccctgcagcagatcgctgaacagcgccggaagatgctgggtatagccgttggcattgaccattaatccgttattagcgccggtagagaacgaaatgccgccgaccgccgcctggttactgagctggtcgagggcgatgccggcgagataatcgttgagggcaaacatcacctgccggcgagcgctgtccatcgcctggggattacgcagcaccagggagatgtccgccttcggctcgctggcaaaatactggctcggggcatacaccacccgcagcgtcggttcatcaaggatcagctgcggatgcggccaggctttatcgcttttgctaagggtgaagtcatccggaatataggggttgagcgccggcagctgcagctggatggcctgcgatttgtgctgccagtcagcgaacgtctgctcgctaatcttatccacctgatacggcgcatcgacaaagtaggccgtcttgttatgcggctcctgggggctgatataccagatgcgggcgttctgcggggtcatcatcgccagccggtctttgatcgcctgcgggtcgtactggtcggcaatattcaccacgtccagcgcatgctcgaccggcacccggatcatggtgtccgccagccattccacgtagtccatgtcgcggttgatcgacggatagcggaaatcgagcgccagcacatgcgccagttcgtcgaaatagcgtttgtcgatgccctgagtacgcaggaggtcgaggtagctgaaaatggccgccgtcacttcatcgcggtgcgccaggcctttgtcggtgagggtggctgagatcgccagtacgccgctgttgccgtttaccaccggatcggaatcggcgcggataccttccgccagaccctgtttttgcaaccagtcagagagcgtgcccgggctgcggttgccgataagataggtgaccagctcatcggttttgctgcggaagcgatcgctgttgttgtcgatgcgaaactcgacgcgcagcactttacgcggcatcgccggcacatagtgaataatgatgcctttttgcgcatccgtgaccaccgggacggtaatttccggcctgctgatctgacgattcggcacgcggccaaaggtgtccgcagccatgcgcgccagcgccggcaacggcttgttgctgtagatcaccgctttcatcagattggcggagtaccagctatcgcggaaggtgtgcagcgcatcaagcaccgggctgccgggcttatcgctgagcgtctcgaggttgccacccgagaagtgggccgccgggtgagccgggttgatggtctccgcgctgacctgggccatgcgcatcccgtctcgcgtccgggccatcgtcagctcggcgttgaccgcgttacgttcgcggtcggcatattttttatccagcagcggcgcggcgatggcgtcggccaggcgatctacggccccgtccagcgcatcattttccacttcaagataaaacgcggtgcggtagggcgcggtactggcgttatggctgccgccgtgcagcttaagaaactctgcaaggctgtcaggctggggatatttttgcgaccccatcagcgtcatatgttccagaaaatgcgccagcccctgatgatctgccggatcctgcagggatcccaccggcaccaccagcgccgacagcgatttcaccgcctgcggatcggaaaccagcagcacgaccatgtcgttatcaaggcggatcgcctgatactgacgcgtatctttttcgcttttgcggatcgtctcctgaatcggctgccatccggtgtcggcctgactaaacggcgcccagagggcggccagcacaacaaaaaccttgaaccataaactgcggggcattcacgaacctcatcattaacaaacttgcgctgcacagcgtgcagccttttatgtccatcagtccgtgatacgttgcgcatattaaatgaaccgtcattcactgcgcaatttttatactatttaaatttgtgtggaccgatggtaacgatatagcggtaacagataacgctgcgtctgggcaatgatttcttcgtaatgcgccggctccagcgaacgccacaggcgttgataccagatatcggcgccctccccgctgaccaccatgttcccttcgtaggtctgcaggaatttgctccgcgctttctgctgcgtctcttcgtccattaagatgacatccttttcggcgtcgtaacaggctttcagccaggcgccaccgctttccggcagcagcagcagcggctgcgacatccccagcaaatagccatccaccagctcgttaaggtacgcctgcgcctcggcgggcgccagcgccggaaagcgccactctccctctttccgcacaaacagccggctctcgccggtgccgccgctggagcagtagacaaggtgttccagccaaagttgcatcccctgggagacgctcagcagcgaaggccgccagcgcagcagaccgtccggctgcacctgctgcagccagccggtcaggttcacgccgccgcactgcagatcgatctccatgctctgcgcctgctggcgctcggccatcacccgctcggccagcgcctgcatctccaggcgctgcgtctcccagaccagctcgccaaaggcgccatacggcagctcgccggcggcgcgaaagcggcggaacatagccgagacgtcctgctcctcaataagcgtattgagcagttgctgattcagttgataacggctcagcccttcaagagtgaacggctcgtcgtctggaatatcgtcctcttcggcgcggaaattgacccgcaaacgctgctgaaagaacgcgcgtaccgggtgctgccagaagcgcagaagctgatcgaacggcaggctgtcaatcggcggcgcggtgagcggctgtataaaatcgctatgcgcctctccctgctggccggcggccgccagccattcacgagcgtagctcttgttctcgtcttcctggaaattggcaacgtcgaacggcatgcgcgtatgcagatgggtgatatgggctttaacccgcgcttcgctggcgtcgcagtcaagctcttcgtcaccggcgagacagtggctctggccgatataatccaccagctcctgcaccagcaccgaaggaaaacgctcgctgttgtcctgtatcgaacggccgatatagctgatatacagcgtctgctcggcggacatcagcgcttcgaggaacagatagcggtcatcatcgcgccggctgcggtcgccgcgctgcggcttctggctcattaaatcaaagcccagcggcggtagcgtgcgcggataaaccccgtcattcatccccagcaggcacaccaccttaaaggggatcgaacgcatcggcatcagggtacagatattgaccgggccggcaagaaagcgctggctgatccgctgctgatcgaggcgctgggccagctcatcgcgcagcagcgtcagcggcacctgctcgccatactgcgcctccagaccgctatcaataaccgccagccactgctgctcaatcagcgccagcgccgcttcggtctcgctgtccggcaggaaaaagtcattcagcagatcgcgacagaccggtagccactccgccagcggccgctgctgggccaggccgcgtcgccacagattaagctgcatcagcagcgacgcgaggttgcccaccagctcggcgatcaaaccgctggattcgtcatatggcagcaccgactgccattctccctcgcggctgtccatcgcgtagcccaacagcatgcgggtgaggccgaaccgccaggtatgctgcccggtcgccggcaggtccagctcacggacgttgtcgtcatccattccccagcggacgccggactcgttcacccactggcgcaggtagcgcagcccttcttccgtgatattaaagcgcgccgccagcaccgggacgtccagcagcgccagcacatcttcactggcgaagcggctgtccggcagcgagagcagcgtgataaacgcctgcagcaccgggtgcgactctcgggcgcgacggtcggagatcgcccacggcagccagcgatcgccgctggcggcgccaaacaccgcctgtatataggggctgtagctgtcgatatccgccaccatgacgatgatatcccgcggcgtgagcgtcggatccgcctccagcatcgccagtagcctatcgtgcagaacctccacttcgcgctgcggactgtggcagacgtgaatgctcagactgcggtcatccagcgccagcggacgtttgtcgcgactgtgggcgaatgcctctgcgctctgcccggccaccgccgcgttgcgcagttcgaggatatccgattgcaggttatgcaacaggttatcgggggcgatgtcgacaaaagcgtccagttcctcatagcgctccagccctgccagcaggtagatatagtcgcgccccagtttgccccaggaggcgagcaacgggttgccgacatcctgttccccggcgtcattaaacaaccccggcgcctgctcggtgtcgcgaaacagaggtagcgcgcgcgcctcgcggtgatggcgccgctggcgcgacagcagcttcgccaggaacgccggatccttaatgtctccccagtagtagcggcaggggttggtaaacaagacatagacatcgacatgcttacccagcgcctgcagcgcctgaagatagaccggcggcagcgcggaaatcccgcagatgaagacgcgcgacggcagcccggcgggcggttcgtccgctttttccagggtactgataaagcgctggtagagattggcgcggtgccactgcggctgccccagctcggcggtatagctcaccagcgcctgccacagcggcgcctgccactgctgggcatcgccgagaccttccacccgctggccggcctcccagcgcatcagccactccgggcgatagacgaggtactggtcatagaggtccgccacccgggcggccagctgaaacagcttgcgcttgtcgccgtcatcactcagatactggcgcagcaggataaaatcgtcttcctccaggtgctgcggcaggagggtcatcagcttccagctcatgctctgcttgctgaaggcgctttcgcccggaatatctttcaggacgcgcacgaacatatcccagataaagctcgccggcagcgggaactcgatattggcggcaatcccgaagcgcgcggccagggtcatctgcagccactgcgccatgccggtactctgcaccagcaccatttcggcctgaaaagggtcatccagccgctggcgctcgacgataaactccatcaacgcctcgagaacatccagccggtttgagtggtatacccttaacataattgctcctgactactggctgaccgggcaatgcagccgggtcatctgcacccgctttgcaacgggtctactgatcgttaccgtgatgctgacacatctttgcctcgatgtctgcatacggcttacctgcccgcgtgccggcgacggcggcgcggagagctggctatagcgccacgcgtcgcgccacagttgacgggtctggttcaactggacaattccttgcgccattccgcgctgatagccgcccagcgcggtgaccgtcagcaccatcagcgccatcgccagcacggtctccggcaggctaaacccccgctgacgcttcagggcatttgacataagctcgcctccctgagcgggcaaaaatcgctccagccgtgggcggaaaaacgcacctgcccgccgcgcacctcgccggactgccagacctgcacctcgccgctggcgctgctgagcaccagtgaaccgtcgccgaagatacgcagacaggcgcgccagccctgcggcgcctgctcccggcaggccagcgccacctgcgccgaccagacctgctgttttccccactgcagcgcggaatgggctatcgccgtatcgcggatcgcctgcgtttcgctggcggtttgcgccagcagcgcccgctgctgcaggttaagcccctcgagtaacaggctgccgagggtcagcaacaggagcaccatcagcagcgacgacattccacgctggcggatcacaggttataccccgtcacccgctgctcaacctcgctcgtcaggcccgtctgttgcgcggagcgcgccgccagcgtcacgctcagctccggcgcgaagcccggggtgacctgacgttgtaccgagaagcgcgtcaccacgatggcggccgggttggtgattttctcccatccgccgccgcggcagtcgctggccccgcgcagggtctccagcgcgccgtcgcgcaggcgaaagccggtgctctccgccgctgccgcgggggaagtttcccatctcccgttgctgttcgcatcccagcgcacaatcagacactccccgccagcggctagctccagcccggctccgccgcacgctccccggcagtacccggcgcgctgcagatgttttcccacggcatgcacgcgctgccacagctcgttctccagggccagctgttcgccctggcgcagaatatgacgctgcagggcaggcagaaagcggcaggcccccatcagcagcagcgagccgatggccatggcgataagcgcctccgccagggaaaatccgcggcggctcactgacaccctcctgcgctgtcgctgcggcataaacgaatccgcccccagtgtgagatcacaatgctccagctgccggccgcgctctgcagccgcagattccccgcccaggcggtgctgcgcagaccataaaaccccagaccaggcgtaacgccagccagcgtgatccccggccagcgcgggcgcagcgtgaaggatgtccccgaggcgcagtcaggcccctccccatccgcgctcaggcaccagcccacttcgtcctggccgacgcgaagcacgcggtcccggttgtaggcgttggcgtcatcgcgcagaaagagcagaaaatcccgcacctggacggcggtttgccacagtcgttgctgctgctgccagcgctgccagccgtacaggccgccgacgctgaggatcatcatcagtgtcagcgttaccagggtttccatcagggtgtagccatgttctctgttcatggcgtcgagtatgccgcggcgattggctctggcgcgacgacggaaaatagctttcccggccagatacgcaaaaaagctttgcatactcgacagaaggacatttttttgcgagcgtctacccaacttcgcccaccgcaaccacctgtggcctggggcaggtgaaaacgaccttctcccggtggtaacggaaagcgctcccatcgggtggtgcgaagggcataaaaaaaccggcgccatcgggcgccggttagtcaactctgctgggggttaaatcgccaccggcgctttaatgcccgggtgcggatcgtaaccttcaatctcgaagtcttcaaagcggtagtcgaagatagacgccggcttgcgtttgatgaccagcttcggcagcggacgcggttcgcggcttagctgcaggttggtctgctcaagatggttgctgtacagatgggtgtctccgccggtccagacgaaatcaccgacctgcagatcgcactgctgcgccaccatatgcaccagcagcgcatagctggcgatattgaacggcaggccgaggaacacatcgcaggaacgctgatacagctggcaggagagcttgccgtcggcgacgtagaactggaagaaggcgtggcacggcgccagcgccattttatccagctcgccgacgttccatgccgagacgatgatccggcgggagtccgggtcgtttttcagctggttcatcaccgtggtgatctggtcgatatggcggccatccggcgcaggccaggaacgccactgtttgccgtagaccggccccaggtcgccgttttcatccgcccactcgtcccagatggtgacgttgttctcatgcagataggcgatgttggtgtcgccctgcaggaaccacagcagttcatggatgatggagcgtaaatgacagcgcttggtggtcaccagcgggaagccttcctgcaggttaaaacgcatctgatggccgaaaatggagatcgtgccagtgccggtgcggtcattttttggcgtgccctcggtgagcactttctgcatcaaatcaagatactgtttcatggttcctcaagaattctgttgctgcggacggtggcggtaagcccaaaccatcataatgatacccgcaagcaccatcgggatcgaaagaatctgccccatgctgatgtactgcacccagccgccggtgaactgggcgtcgggctggcggaagaattccacgatgatgcggaacaggccgtagccaatcaggaacagaccggaaacggagccggtcgggcgcggtttacggataaacaggttgaggatcaggaacagtaccacgccttccagcgccagctcgtacagctgcgacgcgtgacgcggcagcgcgccgtaggtatcgaacagcgattgccattccggatgcgtcggcagcagcgccaggtcttcggcacgggagcccgggaaaatcatcgtgtagtggaagctcgggtctacgcggccccacagctcgccgttgataaagttgcccagacgcccggcgccaagaccaaacgggatcagcggcgcgataaaatcggagacctggaagaaggtgcgtttggtgcgtctggcgaagataatcatcaccaggatcacgccgatcaggccgccgtggaacgacatgccgccgtcccagacgcggaacagatacagcggatcggcaagaaataccggcaggttgtaaaacagcacgtagccgatacgaccgcccaggaagacgccgaggaagcccgcgtagagcaggttttccacttcatttttcgtccagccgctgcccggacgattcgcccgacgggtggccagccacatcgcaaagacaaagcccaccaggtacatcaaaccgtaccagtggagggagaccgggcctagagaaaaaatgaccggatcgaactccggaaaatgcaggtagccactattcatctgtcaccataaagacttgttattccgccgaaagtggacagcggtgatgatccatacccgaacaaaacgggcacgccgaaggaggcgaatcatagcataagccacaagagcgatccgcgccgaacgtgtaaaagatatgtatacggatgctaacagaatgccgttttcccggcggtaccctactttgccggagggtgcgagcagaggatccccgggttacggcttacgcctcacccgggctagcgctaccgcccgccgcggatcaggccgccgagaccgcgacgctccataaaggccgccacctgatggcgcacctcggcggtcatctgcgcatcgaggctgcgacgcgacagctcctgcgcctcttcgatatcaatgcggcgcagcagatacttcaccctcgccaccgagcggccgttcatcgacagatggcggtaaccgaggccgataaggatcgtcacgcacatcgggtcgcccgccatctcgccgcacaggcgcagatcgatgccaaagcgctccgcgtcatgggcgatcatcgccagcgcccgcaataccgcaggatgcaggctgtcatacatgctggcgacccgggtattgttgcggtcgacggccagcaggtactgggtcaggtcgttcgtccctaccgagataaaatcgatccggctggccagctgcggcagcataaagaccatcgacgggacctccagcatcacccccaggcgcggacgtgggatggcgtagccgatcatctcttccacttcccggctggcgcgatcgatcagccgacgggcctcatccacctcctccagactggtcaccatcggcagcaaaatgctgaggttgccggtggcggcgttggcgcgcagcatcgcccgcacctggatcaaaaagatctccggctgatcgagggtgatgcggatcccgcgccagccgaggcacgggttctcttcgctgatcggcatatacggcagctgtttatccgcgccgatgtccagggtacgcagggtcaccggtttgctgttaaacatctgcagcatgccctgatactgggcgacctgctcctcttctgaggggaagccgctctgcagcataaagggaatttcggtgcggtagaggccaatgccgtcaacaaagctgccgagcttctcttcgtgctccgggcttaagccggcgttaagcatgactttcacccgctcgccgcttttcagctccgacgcgcgctggagatcgtcctccgccaggcggctgagttcgttctcttcgctgataaggcgctgatactcctgcaacaggacaggttcaggatccaccagcagctcaccgcgatagccatcgacaatcagcgtatggccatgcagcagcgagggctgaatatcggcgcccatcaccgttgggatgccgagggcccgcaccataatagcggcatgggagttggcggcgccatcgcgcaccaccacgccggccaggcgatcctgcggcacttcggcgagggtggtggccgacagctcgtccgccacgaggataatgcgcgccggccaggtgttgggcccctgaatactgtcgtcgagatggaacagcagacgctggcccagggtacgcagatcgccggcccgctctttcaaatagccgtcgctcagcgcggcaaactgttcggcgaacttctcaatgatctttttgacggcccactcggcgacggcgcctttgtcaacttcggcaaacagctcgcgacgcaggcgggcgtcagagagcaggtgcgagtagagatcgaagatcgccgccgtctctttttgcgccccggcggcgtagcgtttgctgtagcgacgaaactcgttggccgcctcttccagcgcaccggtcaggcgttcgcgttccgaggcggtgtccagcgtcgaggcttcatacacctgctccatcagcggcaggctgacgtccatccagccctcggcgatcgccaccccggaagaggccggcagagcgcgaatgcgcgtttgacgatactggccgaacagggcgttcagctgggactgggagaggatcgccgccatctgggtggcgagggtgacgaggaaagactcttcgctttcatcaaactgacgcagctcgcgctgctggaccaccagcacgcccagcagctggcggcgctgaatgatcggcacgccaaggaaggcgcggaagcggtcctctttgacggcggggatatatttgaagctggggtgtttttgcgcatcggcgaggttgatgggttccgccaggcggccaacaagccccaccaggccttcatcgaacgccagcgcaacggtgcgcccgcgaggtttttttaacccgcgggtggccatcaggtaatagcagcgtcggtcattgtcagccaggtaaaccgagcagacttccgtctccatcgcctggcagacatccgtcaccagaatatccagcgcctcgtttaaacgcggcgcgctcgcgaccttctcgactatttctcgcaaccgagtgagcataatgtgcgtggcttaacctcttttacgtcgataagcaggcgcgttttgcggcttaggtgcgctctccgccagcgacatggtcacgctggcgaactctttcatcacccggcggtagacgtcgcgcttaaacgacaccacctggcgaaccgggtaccagtaactcacccagcgccaaccatcaaattcaggtgtactgctggtttgcatattgatgtccgcatcattgccgatcaactgcaaaagaaaccacttttgtttctggccgatacaaaccggctttgtgtcccaacgcaccaaacgtttaggcaacttgtaacgcagccagttacgggttgaggccaggatccgcacatctttacggcttaacccgacctcttcaaacaattcccgatacatcgcctgctctgcggattctcctggattaatgcccccttgcgggaactgccacgagtgctgaccatagcgccgggcccacatcacctggccctgacgattacagattacaataccgacatttgggcggtagccatcgtcatcaatcaccggactacctcaagataagcttcaatgtgaatgattgtttcacactcgccggaaacggtaaaccactctgttcgcacactgagaacggataacatttgaataactcacagtaattgccagagttataaacaatgaaagcgcgtgacagccgattttattcactttttctgtggatagagttgtgaagaagtacggaattaacccgggaaaacccagagtaatccgaacatcgcatcgctagcatctgaaaataatagtatcatattcataaagttagaatatattcctttcacacattacagcataacgtgacgatcatcacacatgcgatccgccgactgatgaaagatcgagcaatgtcgattttatccacagattacgcgcaggccaccggcagattttctctaaaaattcgattttcgtcgcacgtcaaggctgtaaatcgaaccagtagtgagtcttttccccagttatcccacttttctgtggataacatggtgtaagatcctgtttattgtcagtgaccagttctggaaaacccgtttacaccgttttcataagccgcatgatgagtttaaaaagccatataaatcatgagattggtatagttactcagaaaacggtaaactctatccacaacgcgcaaaattagcgctcactttttaaccaaaggtattaccctatgcccgctatcgctccgctcgcctcaccgccgcaaagtcaggaacagctgctggcccaggcccgccagctggccggctattcgctgggcgagctggcggcgctggcggggatccccattccgcgcgatctgaagcgcgataaaggctggacgggcattctgctggagctgtggctgggcgccagcgcaggcagtaaacccgagcaggatttcgccgcgctgggggtcgagctcaaaacgatccccatcgacagccggggacgcccgctggagaccaccttcgtctgcgtcgccccgttaaccggcaatagcggcgtcacctgggagagcagccatgtacggcataagctgcagcgcgtcctgtggatcccggtggagggtgaacgcaccatcccgctggcggcgcggcgcgtcggcgcaccgctgctgtggagcccggacgaagacgaggagcgccagctgcgcatggactgggaagagctgatggatctcattgttctcggtgaggtcgagcgcattaccgcccgccacggcgaggtgctgcagttaagaccgaaagccgccaacagcaaggcgctgaccgaagccatcggcgcccgcggggagacaatcctcacgctgccgcgcggtttctatctgaaaaagaattttaccgccgctctgcttgcccgccatttcttgttacaacacgattaattttttgttctgcgttgggggttgcatataattgctgctttctattttgcaggactttgaacaatgttatttgcatggataaccgatcctaacgcctggctggcgctgggcacattgacgctgctggagatcgtgctcgggatcgacaatattattttcctctctctggtcgtggctaagctccccaccgcccagcgcgcccatgcgcgccggatcggtttgatgggcgcgatggtcatgcgtctggcgctgctggcctcaatcgcctgggtcgttaagcttaccaacccgctctttaccgttttcggtcaggagatctcgtttcgcgatctgatcttgctgctcggcgggctattccttatctggaaagccagtaaagagatccatgaatctatcgaaggtgaagaggaggggctgaagaccaacgtccactccttcctcggcgccatcgtgcagatcatgctgctggatatcatctttagcctcgattcagtgatcaccgccgtcggcctgtcggatcatctgttcatcatgatggcggcagtggtgatcgcggtgggggtgatgatgttcgccgcgcgacccatcggcgattttgttgaccgtcatccttcggtgaaaatgctggcgctgtcgtttctgatcctcgtcggctttaccctgatgctggaaagcttcgacgtccatgtgccgaagggatacatctatttcgccatgttcttctctatcgcggtggagagccttaacctgctgcgtaataagaaaaacccgctgtaaaccacaaaattgcagcctggtcacaggctgcaaccctttttcagactttactgctttttatgtctcacaaatcaggctattaatagacgggtatggggtgcagctactgaagaggtgttgacgatgaagaaatgggcagtattgatttccgccgtaggactggcgttctcggtttccggttgcagcagcgattacgtcatggcgaccaaagatgggcgaatgatcctgaccgacggtaaacctaccgtggatgacgataccggtttaatcagttacgaagatcagcagggtaataaaatgcagatcaatcgtgacgacgtttcgcaaatcattaagcgttaatctttccctgtcggccccagcttctgttgacgctgcgcttaccgaccaccagtcttttgagaagagtcgggatataccaggacgccgcgggtttcacccaccgcccctcctcgtcacccggcttttttgattttttacttcctctttttctcaccctctgccatgttgatactcctttgtcggggaatgcctgaccttataaataaaaaggaagctggctatgcagtatcaccgtatcccacacagttctcttgaaatcagcaccctcgggctgggaaccatgacttttggcgaacagaatagcgaggccgatgcccaccagcagctcgattacgcggttgccaacggcatcaacctgatcgatgtcgctgaaatgtacccggtcccgccgcgcccggaaacccaggggctgactgaaacctacgtcggcaactggctggcgaaacgcggcaatcgcgaaaagctggtgctcgcctcgaaagtcagcgggcccgcgcgcaataacgacagcagcattcggcccaatcacgtcctggaccgcaaaaatatccgcgaggcgctgcacgccagcctgaagcggctgcagaccgattatctcgatttatatcaggttcactggccgcagcggccaaccaactgctttggcaagctgggctatacctgggccgacgccgcgcccgccgtgacgctgctggataccctcgaagcgctgaccgagttccagcgcgccgggaagatccgctacatcggcgtgtcgaacgaaaccgccttcggcgtgatgcgttatctgcacctggcggataagcacgacctcccgcggatcgtgactattcagaatccttacagcctgctgaaccgcagctttgaagtcggcctcgcggaagtgagtcagttcgaaggcgtggagctgctggcctactcttgtctggctttcggcacactgaccggcaagtatctcaacggtgcgaagccggcaggggcgcgcaatacgctgttcagccgctttacgcgctacagcagcgagcagtcgcagaaagcggtagcggcctatgtggatatcgccaaacgccacggcctcgatccggcgcaaatggcgctggcctttgtgcgtcggcagccgtttgtcgccagcaccctgctgggggcgacgaccatgacgcagctgcaggccaacgtggaaagtttgcagcttgagctaagcgaagaggtattagcggagattgaggcggtgcatcaggtttatacctacccggcgccgtaagaaagcaaagccccgggtaaggcttatacgccttacccgggctactgaagagcagatattggcgaccccctcgcccagtcaagcgcagcgcaagccgggaggttatttacgccgcccccagacccacagcgcggcaatggccacggcgaataccgcgccaaagcctatccccacggcgaccggtggaacgcccacgctcaccgccagggaatagagccccagcatcagcagcatcgccacgttctcaccgaggttctgtaccgcaatggcgttacctgccccgaccgaatgtttcccacgctcctgcagcagcgcgttcagcggtacgataaagaacccgccgaacaccccgagcagcagcagcagaccgaacgccggcagcagcgactgctgcaccgcaaaggctatcaccgcgataccgatcaaaatcccggccggcatacagcgcgacaccgtctccagggtcaccagcttcgccgccgccccggcacccagcacaatccccaccgccaccatcgcattaagataggtgggcatggcgttgctggtaatgcccagcgccaccggcacccagatcaccagcaggaaacgcagggtcacgccagcgccccagaacaggctggtgcccatcagcgaaaagcgggtttcgccgttgcgccacagcgtccggcaggcgctgaagaagctgtgcgtcattggcttaaaacgccacgactgccccggacgcgctgccggcagcctgggtatccacaggttagccactaccgccccgccgtagaccagcgcgcagacgatcagcgccgccagcacgtgccagtcggcgaggatcccgccggccatggagcccagcaggatcgccgcgatggtcgaggactccatcagtccgttagccttcactaacttatcgccggtggtgagttcgccgagaatgccatacttggccggcgaataggcggcggcgccaatccccaccagcgtatagccgataaacggattgacgccgaagcagatgcagccggcgccgagcagtttcaggccgttggccaccatcatcacccggcctttggcaaagctatcggcgaactgaccgacaaagggggcaaagaggatgtaagcgcccacaaacaacatctgcaggaccggctggctccactccggataatagagctgcttcatcagcgccagggtggcgaagagaagcgcattgtcgccgaaggccgacaggaactgggcgcagatcaccgccagcatccctttcgagtacagcgaagggttagtatgtactgactcactcatgggttgtttccgcctcgtcgaccatatttttcagggtgacatagtctggcttgccgctgccgagcaccggtagctgtttcagccagcgtatatctcgcggcaccgccagctccggtacgccgtgctggcgggcgtagcgcagcagggcttcacgagtcagttcattatcggtggtaaacagcaccagcgcctcgcctttgctggcgtcctgtttaatcgccgtggcgtgcattttgtccggcgacgcgccgagggccacctgctccaccatctcgagggagatcatctcgccggcgattttggcgaagcgcttcgcgcggccctgaatgcggacatagccctgctcgtcgaaggtaacgatatccccggtgtcataccagcccgcttccatctcgccgtgctggttttccgccgcaggcgcttccagcacgccggggttttccacccgcaggtagcctttcatgatgttcggccctttcagctgcagccgccccccttgatcaatgcctggcatcgccagcaggcgggcgtccatccccggcaggatgcggcccacggtgccgaccttcgccgccatcggcacgttaatcgagaccaccggcgcgcactcggtcacgccatagccttcgagaatgcgcaggccgaatttatcctgccacagctgtttggtgctctcctgcagcttctccgccccggcgaccacgtagcgcaggcggtaaaaatcgtacggattggcgaaacgggcatagttggcgaggaaggtcgaagtgccgaacagcaccgtacagttgcgatcgtagaccagctccggcaccacgcgatagtgcagcgggctgggatagagaaacacttccgccccggtaagcagcggcgtcagcaggccgacggtgaggccaaaagagtggaacagcggcagcgccgacataaagcggtcattggcggtaaagtcggcgatagttttgatctgctcgacgttggacagcagactcttatggctgtgcaccacccctttcggattgccctcggaaccggaggtgaagaggatcatcgccgcgtcttccggctgctgcttaacctgcgccagacgcggcgccagcagatgagcaaaaatccacagtttgtcagcgagggtgatatcgcctttaagatcttccaggaatacccagcgcacctgggtcagctgctccggcaggtgccagagtttgcctttatcgaggaaggtgcgcgaggtgaaaatggtgttgagctccgcggcggctatcgcgctgctgagccctttcaccccggcggtatagttcatcatcgccggaatacgcccgcgggcgatagcgccgaaaatcaccgccgcgctgatgccggcgttaggcagcatcaggccgatcttctcgcccggctggctgtatttttccagaatgcgggcgacaaacagggttttggttagcagcttgcgataggtatccggctggaagttgatatcctccacgcagggtttgcgcgcgccgaagcggtcctgcgccgccagcagcgactcatacagggtttcccgcgggcgcaccgccatccgggcttccatcatgatctgatgcagcatctccccggcgatcttccgccggtcgcgggcgcgcggcgcctcgggcatcggcagatgggtgggcggcaggagatgcagctgaatacgcgggaacaggcgacgtttcaccagccccttcagccggctgaagggcgtcagttcggcgccttcaatacgcagcggcacaatggtcgcctgcgatttggcggcgacaaaggcggcgccgtcataaattttcatcagcgagccgctgaccgaaattcgcccttccgggaaaataaccaccggccgcccctgctcaatcaggcgcaccagatgtttgatcgacatcggcttggtcgggtccagcggcacaaaatcgataatcggcgtcagcgcgcgcataaaccagcgctggctgattgaggtatagaccgcaaaaaccggtcggaccggcaaaaacagcgccagcagaatgccgtcgaggaaagagacgtggttcggggtgattaagaccttttgctggtataaagcctgcgtgtcgccggtcagtctgacccggtataaccccttgaacagcagtctgaaaaatcccaaaagcataacaactccatgtgaccggttgatgagtcaaagcaggttacacgagaaggcatgggaaagcagtgcagcggggggattttcggaataaaaaaaacctgcgcatccgcgcaggtcggtgtaagacgttcagtacgaagagcgtacctgagaaactcacctatcaatacctctgggatctcgattgtcacgttttttggccgtaacgggccagcgggaaaacgcaagggagtgagcctaagtgcaacgaggtattacgattttcgctatctgtaacaacgccgatagcgggcaaaaaaaaacctgcgcatctgcgcaggctggtgtaagtaaagtggtcaacgtgacgttgactccacctatcaatacctctgggagagccagaatatcaaccggatccgcgaacaaaccagcgaacattcgcaacagcgcatcgcaaagtgtaagcaaaggtttgtatttccctgcgccggtttcaattaccgatcgcgtcaatgtaaacaggtcaccgataagcccgcgctgaatcacatttgcgccattccttcgccgccgcgccttgaatctgccgctctttcccgtaacatagcagtatgtaaacgcttaccctagaaaaggcatggtatggcgactattaaggatgtagcccgactcgcaggagtctccgtcgctaccgtctcccgcgtcatcaacaactctcccaaagccagcgaagcctcgcgtcagtccgtgggcgcggcgatggaaaccctgaactatcaccccaacgcgaacgcccgggcgctggcccagcagtcaacggaaaccgtcggcctggtggtgggcgatgtctccgaccccttcttcggcgcgatggtcaaagccgtcgaacaggtggcctaccgcaccggcaattttttgctgattggcaatggctaccacaacgtgcagaaggagcgccaggcgatagagcagctgatccgccatcgctgcgcggcgctggtggtgcacgccaaaatgatccccgatgaggaactggcggggttaatgaaacagatccccggcatggtgctgatcaaccgcatcctgcccggatatgaaacccgctgcgtggcgctggacgaccgctacggcgcctggctggcgacccgccatttgatccagcaggggcacacgcgtatcggctatctgtgctcaaaccatgatatctccgatgcggaagatcggctgcaggggtactacgcggcgctggaggagagcggcctgccgtgcaacgaccggctggtcacgtttgccgagccggatgaaagcggcggcgaacaggcgatgaccgaactgcttggccgcggccgccactttagcgccgtcgcctgctataacgactcgatggccgccggcgcgatgggggtgctgaatgacaatggcatcgacgttccgcgggagatttcgctgattggcttcgacgatgtcctgatttcgcgctatgtccgcccgcggttgactaccgtccgctatccgatcgtcacgatggcgacccaggcggccgagctggctttagccctggcggagcagcggccggcgccggagatcacccatctgttcagcccgacgctggtccgtcgtcactcggtggtcgccccgcaggaaggcgataagtcatagcgatagaggtgcacggcggtggccgggtaatccagcccctcgccgatgtagcgccagccgaagcgttcatagaaatcccggcaggcggagtagagatagagctcccgaaagcccgcgcggcgggcataatcgatcacatgccgctgcagttttccggccagcccctgaccgcgggcggcgggcgcgacgaacagcgccgccagccagggaaacagatcctggcggctgatcaaatcgcagcgccagaggccaatcgtgccgagcaactgctcgccttccacggcaataaaggtcaacggcagcgcctccgccgtctggctatgctgcacgatgctggcgaagaattgccgcggcagcgtctcgccgccaaaggcctgccacagccagtcggtcacctgcggggcgaactgcggcgcagcgtacagcggcaggatcgtcataccagcttcccctgaaaaatcggcactgagtcgaacagatagccgtcaaagtcgggggcgtcctcatcggacagctccagcaggctgtttttgacgttttccagatgctgccacatcgcctgccaggcgcccatcacatcgcgacgccgcagcgcggcgagcagggtctgccggtcgccgagccatttcagccgccaggcgcggctggcaatatgcacattgaactgctgccacagcgggctgctgtccatctgcagccagatccgctctaccgtcgccaacagcatctggttctgcgtcgccccggcgagcaccagatggaacagacgagcgttatcctgcgcggtgtcgttgagagcgattgcccgctgctcctgttcaataatccgcttcagattgtcgatatcggcgcgggtggccattttcgcggcaaaggcggcgatgttgctctccagcagctggcgcgcctggagaatttcaaacgggccgacgtcgctgctgagcagctgctcctcttcgctgtcgttctcgtggggaatgcgcatgacatacaccccggatccctgacgaatatccaccgtcccctgcagctccagcatcagcagcgcttcgcgcacgatggtccggctgacgccataggtttcggcaatatggcgttccggcggcaaacgcgacccgaccgggtagcgcccctgcgcgatctgggcgcgcaggtcatcaccaatctcctgatagggcttcttttccggcggaactatcgctttttccacaaaatcacctgtgcgttacatgcctgcgagtcaaatacgccgctatcttagcaaatattgcccccggctagcggtattcatcatcgatatccagcaccagttcacgccgttcgcccagttgacgaaaccagtgcgccgaggctttggctcgccgggcgcgatggttttgcagatcgatttcgataagcccgtagcggtttttaaaggcgttcatcggcgatacgttgtcggtaaacgcccacagcatatagccctggcagttggcccctgcctcgcgggcgcgcagggtgtgccacagatgttcgctgataaaacgaatgcggtagctgtcatcgatgacgccttcgcggttacggaactggccttcgttttccacccccatcccgctctccgccacgaaccacgggatgttgcgatagtcattttttatccgcatcgccatatcaaagatgatttgcgggtagatttcccagccgcgggaggcgttcatccgccggccgggcagctcaaacggctcataataccaggccggatggaacggggtatgcggatgccaggcccgcgacggggctttgacccggtgcgggtagtaaagattaatccccagctcatcgacggtgtgctcgcggataaccgccagatcctcctcgctggtctcccacgtcacctgatgctgctcaagcagcgcgagaagctccggcggccagacgccgtgcaccagcgggtcgaggaacatgcggttgtagaacagatcgtagatctccgccgcgcgcaggtcatggggggcgcgtgagcgtgggtaggtcacctccggattgaggatgcagccgatggtcccgggatagccgagctcgcgaaaccgcttcacgacgctggcggtcgccagcaccttatgatagttccactgcatccaggtgctggtgttctgctcatagggccagcgcagagcatccagatagacccgggtctgcaccacaattggctcattaaaggtaaaccagcgcgtcaccttcgggtggtagcgggcaaacaccttctccgcgtagcgcacaaacagctcaaccaccgttttcgacccccagccgccatatttttccagcagatagccgggcaattcataatgctcaaggcagatcatcggcgtgatgccgttggccagcagcgcatcgaacagctggtcgtaataggccgcatactcctcatccaccgtgacgttttcatagtcggtcagaaagcgcgaccagttgattgaggtgcggtagtgggtcagcccggccagcttcatcagctgcacatcttcctgaaagcggttgataaaatcggtggccaccgccgggccatagccgttatgccagacgtggcgatcgtttttgtaccagagatcgggccaggagtcctgccctggttttttcccgctccagccttcggtctgccaggcggaagccgccgcgccaaggataaaatcatcgggaatggtcatccgtacggtagtcataggctcctcagacagggttggcggtttgttgattgtctacctgacgctgcgcggcatcggcacggcgggaggcgattttgacgaaaggcagatagataagcaccgcgacgacgatgcagataagctgggtcaccaccgcccccatcgagccggcggtggagagccaggcgttgatcagcggcggcgtggtccaggggaccatcaccaccgccttgccggcgaagccggtcagggtggcgaaatagccgatgctgccggtcaccagcggggtgatgataaacgggatggcgaggatcgggttaagcatgatcggcatcccgaagatcaccggctcgttaatattgaacagccccgggcctatcgacagcttggcgatctctttcatctctttgcgtctggtggcgatcatcaccgcaatcagcaggccgatggtcagccccgagccgccgatgctcatgtagacatcccagaagggcatcgtgatgatgttcggtacctctttcccctgctcaaaagcgctcatattgacggtgatcgctcccagcagcagcggctcgcggatcggcttgatcatctggttgccgtgaatgccgatcacccagaacagctgggcgacgaacatcagcagcaggatccccggcaggctctgcaccacccgctccagcggttgctgcaccacctggtagaccgcatcgtagagatacattcccgtcagctggtgaaagagaaaaccaaaggtggcgatcgcggtggtggtgatgatcgccgggatcagcgcggaaaaagaggcagagacgttcggcggcacggtatccggcattttgatcttcagtcccttgcgcccttccagccagcagtaaatctccactgacagaatggcgatgaacatcccaaggaacagactgcgggtatcggaaaactggcgcagcaggacatctttcaccacgtgcatctggccatcgaccatcatctccaccgtggtcggcgtgacgcagataaagcagatcaccgccaacaggccgggaaacaggcttttgatgccgttgatccgccccagctcaataccgatcagaaacacggcgccgatattgaggaagttgagcgtagcgtagttaagcgcgctggtgatcggcttcagcgccgcaagaaaggagagcgaggaaaagctggcgagcccattcttcggatccagcaccatattggagatcagcaccgaaaaggccccgacgatgatcaccggcatcagggtaataaacgccgatttgatcgccataatgtagcgatagctgttgaatgtcgtcgcgaaacgccccagcgcgtcgatcagtttgtcctgtaatgccataaaagagtacctcagtgtaaagggcttaatgcggccaggtgaacagccagagacttttggcataccaaaacatagtcgccaggcaaaaatagttctgtgacagcgctcgcaacgcgcacagtggtatcccaaatatccgataaaatcgacattggcataccagagtctgtcggctcgtcagttcctgccaaaagcgtgatcgcgatggtttttccgccccgccccgtcgatatgtcccttttcggtctgtgataaactgcgctttaccacgtgaaatcaggaatcgatgaatggctacaatgctggatgtctcaattcgcgcaggcgtctcgaaagcgacggtttcccgcgtgttgaacggcacaggtcaggtgaaagagagcacccgccaacaggtctttaaagcgatggaagagctgggctaccggcccaatttccttgcccgctcgctggccaatcagaccagcaatagtatcgggctggtcgtctccacctttgacggcttctactttggccgtctgctgcagcaggcgtcacgccagaccgaagcctggggaaagcagcttatcgtcaccgacggccatgatacgccggagcgcgaagaggaagcggtgcagatgctcgccgaccggcagtgcgatgcgatcatcctctatacccggcacatgagcgagaaggcgatcatgtcgctgattaactcgatcgccatgccgctggtggtgattaaccgcgatgtggcgcaggcccgcgaacgctgcgtgttcttcgaacagcaggaagccgccttccaggccgtggagtatctgattacccagggccaccgcgatatcgcctgcatcaccgtcccgatgcatacccctaccggccaggctcgcctgcagggctaccgcaacgcgctgataaaacatggtattgagtgggatccgagccgggtgaagtatggggactcgacgatgacccgcggctacgaactgtgccgggaactgctggacgagaaagcccgcttcagcgcgctgttttcctgtaacgatgatatggcgcttggggcgtcaaaggcgctgcatcaggcggggctgcgtattccacaggatgtgtcgctgtttggcttcgacgatgcgccaagcgcgaaatggctggagccggggctgtcgacggtttatctgccgatcgacaacatgatcactacggctatcgaccaggcgatcaagcttgccaatcagcagccgatagaaacgatcccgccgtttaccggcacgctggtgcttcgcgagtcggtgacgacgggacctttttttaaataagctctaaggccagcagctcctggatggtctggcgacggcggatcagccgcgccttgccgccatcaaacagcacctccggcagcagcggacggctgttatagttggacgacatcgaagccccgtaggcgccggtgtcatggagcaccagataatccccaggcgccactgccggcagcaggcgggtctcgactttgcccccctcctgctgggtaaagacatccccggattcgcacagcggcccggccaccacggtttcgacctgcggcgcggcgctgagatcccggccatcccccgccagagcggtgatatggtgatagctaccgtacattgccgggcgcatcaggtcgttaaagccggcgtcaatcagcacgaagtgacggctgcccatctctttcacgctgcgcacctgcgacaccagcacgccggactcggccaccaggaagcgcccgggctcaatctccagtttcaccgggtgccccagatgggccgcgatctgctcccgggcgcggttccacaggccataatagtgggcggtgtcgatggcctcttcaccttcgcggtaaggaatcgacagaccgccgccggcggagatggcctgcagatcctggccaaagtcgacgacctggcgcaccatcgcgccgcacacctgctccaggtgaccatagtcaacgccagagccgatatgcatatggatcccgaccagctgcagctgatagcgacgcatcacttccagcgccgccggcaggtggctgtaccagatgccatgcttgctattctcaccgccggtattggttttctggctgtggccgtggccaaagcccgggttgacgcgcagccagacgcgatggcccggcgacacctcgcccagctggctcagcatgtcgatcgagccggcgttcaccgggatctgtaacgccttcacccgatcgagggtggcgtcgtcgatcagatcggcggtgaagacgatatcctcgggattctgctgcggatcgtagcctgccgccagcgcccgctcgatctcccccagcgacaccgagtccaccttcaccccctgctcacgcatcagacgcagaatatgaatgttagagcaggctttttgcgcaaaacgcaccacgtcgaactggctgagctgggctatctggcggcgaataatctgcgcatcatagacccagaccgggcagccaaattccgccggcaggcgcagcaggttgtccgcggtcaggtcagtatcggtggcgtaaagcgagtgtggcataagaactccggtgcagtgcgtgtgttggtcgctgttttttctgattacgccacagtgacagacgaataaaaaatatcgttttatcgcgactctatgcaaaaatgatatggttccagccgagcctcacggagaccgcatgccagccgtcaatttgcgtcatatcgaaatctttcacgcggtgatgaccaccggcaacctgaccgaagcggcgcggatgctgcacacctcgcaacccaccgtcagtcgcgagctggcgcgctttgagaaggtgctcggcctgcagctgtttgagcggacccgcggtcgcctgcagccgacggtgcagggcctgcgtttgtttgaggaggttcagcgctcctggtatggcctggaccgtatcgtcagcgccgccgagagcctgcgcgagttccgccagggcgagctgtcgatcgcctgtctgccggtgttttcccagtcctttctgccgctgctgttgccgccgtttctctctcgctatccggaggtcagcctgcagatcgtcccccaggagtcgccgctgctggaggagtggctctccgcccagcgccatgaccttggcctgacggagaccctgcatacccccgcgggcaccgaacgcaccccgctgctgacgctgaatgaagtctgcgtgctgcccgccggccatccgctggcggcgcaggcgacgctgacccccgccgattttcagggcgaaaactacatcagcctgtcgcgcaccgacagctatcgccagctgctcgacgccctgttccttgagcatcaggttaaacggcggatggtggtcgaaacccacagcgcggcctcgatctgcgccatggtgcgcgccggcgccgggatctcggtggtgaatccgttaaccgccctggactatgccgatagcggcgtggtggtgcgccgcttcagcgtcgaggtgccgtttaccgtcagcctgatccgccctctccaccgcccgcgctcggcgctggtcgacgcctttgttgcccacctgcagcagagtctgccgcagatcctcacgccgctggcgtcggtcctgcagagagcataaagttgaccgcgtcttccgcgtggatcgccgcggtgtcaaagaccggcagcgggctgagctcggcaggcaccagcaggccaatctccgtacagccgaaaataaccccttccgccccctgctccgccagggcggcgatcgtctgcagataataatcccgcgacgcctcgctgaaggtgccgagacaaagttcgtcgaagatgatctgattgatctgcgcccgatcgtcagcctcagggatcagcgtctcgatggcaaactgctcctgcagacgaccgcggtaaaaggtctgctccatggtatagcgggtgcccagcagcgcgacccggcgctgacctttggcggcaatcgcccgtccggtggcatcggcaatatgcaggaagggaacctggcagcgggcggcgatggcatctgcgactttatgcatagtgttggtgcacaggacaatgccttcggcccccgcctgctgcagcccgaccgcggcctcagcaaggatctccccggcgcgatcccagtcgccggcggactggcaggcttcgatgtcgtgaaaatcgacgctgtgcagcaccaggctggcagagtgcaggccgcccagtcgcgccttaacgccctcattgatcaaccgataataggggatcgtggactcccagctcatgccgcctaacaggccaatggttttcatcttctgctccttatgtcgtttctgccagtgaagcaaacttgtgatcaactttccacttctctggccgcgtatttctttttcatgaagagtgggataagttaaatgaaacaatgtttcactttaacaacaggatcgcccgatgtttatttttcataaagacaccacccttgaagacctcggcaatggcgtaacccgccgcattctggcccacgacggcaaaatgatggccgtggaggtgaattttgccgccggcgccgtcggcccgatgcataaccatcctcacgaacagctcacctatgtgctttccggcgagttcgagttcaccatcggcgaggagacgcgcgtcgtcagcgccggcgatacgttgtataagcggccggggattatgcacggttgcgtctgcctgcagcccggcacgctgctcgatacctttactcccattcgcgaagattttcttgaaggctaatccataacgggggcgttcgccgtccccggttactgcccggcgcccttcaataaaaagatgctgtcacaatcattatcctggtaataatatttcccgctcagttaagcctaatttttcattcctttcaggcgccctttacggccaaaatgcttaccatctcacctttttgaaacatcgtttcgactttgatcacatttccatcctgatctgcatgacgcagaaacaaatcgcaataaaatgaaattaaaacggtgttttataaaaaacagttcagcataaaaaaaggggctgtcagcccttacctgctagaccagttaaagaataacccattaattaacaaggacatgttaagcagaggaagcgttcagacatttttgcgttgtcaggcgtaaaaggccgacagcgcggcgtcaccggatccgtattacaactcgtaagccaggtaggtatgtatgaatgaaaacaagctgctgggattggcatggatatcgccctatatcatcgggctgatcgtctttaccgcttttccctttgtttcatctttctttctcagttttaccgagtacgacttgatgagcccgccggtatttaacggcatcgaaaactatcgctatatgttgaccgaggatagcctgttctggaaatcgatgggggtgacctttgcctacgtctttttaaccatccccttaaaactggctttcgccctcggcattgcttttgtgctcaatttcaaactgcgcggcatcggctttttccgcaccgcctattacatcccgtcgatccttggcagctcggtggcgattgccgtgctgtggcgcgccctgttcgccattgacggcctgctgaacagttttctcgccgtctttggcattgatgccatcaactggctgggggaaccctccctggcgctgatgtcggtcaccctgctgcgcgtctggcagtttggctccgcgatggtcatcttcctcgccgcgctgcagaacgttccgcagtcgcagtatgaggcggcaatgattgacggcgcctcaaagtggcagatgttcatgaaggtcaccgtgccgctgatcaccccggtgattttcttcaactttattatgcagaccacccaggcgttccaggagtttaccggcccgtacgtgataaccggcggcggtccgacctattacacctacctgttctcactctatatctacgataccgcctttaagtacttcgacatgggctatggcgccgcgctggcgtgggtgctgttcctcgtcgtggcggtctttgcgtcgatcgcctttaagtcatcgaaatactgggtcttctactccgccgataagggaggcaaaaatggctgatattcaacagatggcgccggtgatgagcgacgccgatcgtgaggtcgcccgtacgctgcgccgggaaaaggtgagccgggtggtgcgctacgtcgtgctgatattcgtcggcctgctgatgctctacccgctggcgtggatgttctccgcctcgttcaagccgaaccatgagatcttcaccaccctcgggctgtggcctgcccacgccacctgggacgggtttatcaacggctggaagaccggcaccgaataccatttcggccactatatgctgaacacctttaagtatgtgatcccgaaagtggtgttaacgatcatttcctccaccatcgtggcgtacggcttcgcacgctttgagatcccgtggaagaagttctggttcgcaacgcttatcaccaccatgctgctgccgagcaccgtcctgctgatcccgcagtacctgatgttccgcgaaatggggatgctgaacagctatctgccgctgtacctgccgctggccttcgccacccagggattcttcgtcttcatgctgatccagtttctgcgcggcgtgccgcgcgatatggaagaggcggcgcagatcgacggctgcaactccatccaggtgctgtggtatgtggtggtgccgatcctcaagccggccattatctcggtggcgctgttccagtttatgtggtcgatgaacgactttatcggtccgctgatctacgtctacagcgtcgataagtatcccatcgcgctggcgctaaaaatgtctatcgacgtcacggaaggcgcgccgtggaacgaaattctggcaatggcgagcatctccattctgccgtccatcattgtcttcttcctggctcaacgctacttcgtgcagggcgtgaccagcagcggaatcaaaggttaagagggaaatatcatggctgaagtgattttcaacaaactggaaaaagtctactccaacgggtttaaagcggtgcatggtatcgacctgaagattgccgatggcgaatttatggtgatcgtcggcccctccggctgcgccaaatcgaccaccctgcgcatgctggcgggtctggagaccatcagcggcggcgaggtgcggattggggacaaaatcgtcaacaacctggcgcctaaatcccgtggcatcgcgatggtgttccagaactacgccctctatccgcatatgacggtgcgcgaaaacctcgcctttggcctcaaactaagcaagctgccgaaggcgcaaatcgacagacaggtggaagaagcggcgaaaattctcgaactggaagaactgctcgatcgcctgccgcgccagctctccggcggccaggcgcagcgcgtggcggtgggccgggcgatcgtcaaaaaaccggacgtcttcctgttcgacgaaccgctctccaaccttgacgccaagctgcgcgcctcgatgcggatccgcatttccgatctgcataagcagttgaaaaaatctggcaaaccggcgaccaccgtctacgtcacccacgatcagacggaagcgatgaccatgggcgaccgcatctgcgtgatgaagctcggccacattatgcaggttgataccccggacaatctctaccaccagccgaaaaatatgtttgtcgccgggtttatcggcgcgccggagatgaatattcgtcccagccagctggttgagcacggtggtcgcctgtatttgacgctgggcgatcagcggctgccgctcaacgatcggctgcaaagcaaagttgaaacccataagaatcagcaggtgttctttggcgtgcgcccggagtttgtctctctctccgatgaaccgtttgccgaaggttcctgcgcgggtgaaatggtacgcgtagaaaacatgggacatgaattctttgtttatctcagggttgctgattatgagctgaccgcccgcgtgccgtcggacgatgcgaagccgatgattgccaagggactgaatcgcaaagtctatttcacctttgatctcaacaagtgtcacatctttgacgccaaaaccgaacagaacctctctctgtgaaccctggagcataacaatgaaaaacgtgctgataagcgccaccctctccgccaccctgggccttagcgccttctcttcgctagcgcaggatgtcgacctgcgtatgtcctggtgggggggcaacggccgccatcaggtcaccctcaaggcgctggaggaattccacaaacaaaacccagacatcaacgtcaaagcagaatacaccggctgggacggccatctttcacgcctgaccacccagattgccggcggtaccgagcctgacgtgatgcagaccaactggaactggctgccgatcttttcgaaaaatggcgatggcttttacgatctgaataccctgaaagacgagatcgacctcagccagttcgacgccaaagaactgcagtccaccacggtcaacggcaagcttaacggtattccaatttccgtcaccgcccgcgtcttctactttaacgacgaagcatggaaaaaggcgggcatccccttcccgaaaacctgggatgaactcatggcggcgggaaaaactttcgaaagcaagctcgggaaacagtactacccggtggtgctcgaacaccaggacgtgctggccctgctcaactcttatatggtgcaaaaatacaatcagccggccatcgatgagaaagggcgaaaattctcctacagcaaagcgcagtgggcggatttcttcggtatgtataagaagcttatcgacagccatgtgatgccggacacccgctactatgcctccttcggcaagagcaacatgtacgaaatgaagccgtggatccagggcgaatggggcgggacctacatgtggaactccaccatcaacaaatattccgataacctgaagccgccggcgaagctggtgctgggggaatacccgatgctgccgggcgccaccgatgccggactgttcttcaagcccgcgcaaatgttatcgattggcaaatcgacgaaaaacccgcaggcggcggcgaaagtgattaacttcctgctgaacagcaaagaaggggtggatattcttggactggagcgcggcgtgccgctgagtaaagcggcggtcacctacctgaccgaggatggggtaatcaaagccgacgatccggcggtgtccggcctgaagctggcgcaatccctgcccaccgctctgccggtctccccgtacttcgacgatccgcagatcgtcgcccagttcggcaccaccctgcagtacatcgactacggtaaaaagtcggtggaagaagcggccgaggacttccagcgccagaccgaccgcattctgcgccgcgcgatgcgctaacctgcccgtctgaactctcccgcggcgcacgccgcgggagggtctgccagacggccctgtcagaagaaatatttaaagcgcacccgggcgccgtagcgttcatcgggattcccgctcttcgctgccgtggaatcgagccacgaggcataggcgccaaggtaaatattgaagttcggcatcgccatgatattcggcaactgccaggaggtgtgcaaggtatggatgtcatagcgccccggcgccaggatagcgcaatcgccatcgcattcgctggtcaccccggccatattgaactggtcgattttattgtgcgcatagatatagcccagctccacgcgatgccaaagggcgttgatcccggcgctgaagtcggtttcgtccgccgcgtccagcagggcggtactcagattgaccaccgccccatcctgcggatcgcttttcagggtgttccagctcatggtcagcccgtagccggtgcggtttgactggtcgacccagcgtccgctctggctctgatagccgtaagcattgttgacgagattgctctctatcgccgcggccgccgaccagacgccggactgccatgccgccaccggccgcacgtacaccacatttttgcggttttccagcgcgttaccatgatagttctgatcgacaaacagcgaactgccgtcctccaccagggtgttaacttcgaaataccagttatccaccgttttgctaaacagaaggttaccgccgctgctgctgcgcccgcgcccctctttcatcatgtaaatatagccatagccatcggaatagagatcgttggcggtattacctgaatattcaataaaggtatcctgattcagcgggaacatatcccaggcttcaaagcggcctatttttattttccagtcatcctgctggccgaagaaaaataccgcatcatcaagattcattttgccatccatatccgccagaggctgcacgctgaatccggcatattgcccgtcggcgccattccgtctgccatcgaaacccagcagaatacgaccgttaatatcccagcgctctttatcgccgggcgcccagcttttattcgcgctggttttgaccgacgtcaggctgccggtgcgactggcgccatcgaggttaaattcgacgtcgccataaaattttaattcgccattgtcatttagctgcaaacgcggcgaagcaggcgccgcgcgggcgaccgtcgcggcctgctgctggcctttcagcgtcttaatttccgcctctgcgctggcggcgcgcgcctccgtcgcctttagccgctgctccatttgcgccagtcgctcctccagcgataacggcgcctgcgccataacggatggcagatacagagacgtcagaaaacacccgacccagattttattcatcggtaaacccttttattatggaatgaactgaattttttattaatgggtaacgcacgacgatgcaggcaataataacccgcccatcgtcaaagacgggttattaacgacaacagccttattattattcgagctgccaggcgccggcttcggttaatgccgccgagccgctccaggcaaataacgctaattcacggcggggagcctgcggatagatacggctgctcaggcaagcttcgccgtcattgacaaaaacctccaccgaagagctatcgaaaaatattcgcaggttgagatccgccccggcggtcaacggcacgctgcgcgtcccgcacaggccatactgcggataatgccgctccagcaccagacgctgctgttgggcatccacgtagatgcgcaggccatcgccaaagcgcagaccatactgctcggcgctgctgcgggcgcagtcccagcgcagattcacctccatcgcctcgcagttgtcgaccatcgtcgtctgctggttgttcagggtgctgaccggccacgggaaccaggcgccgcgcaggctctccacttctttcgccgggcgcatctgcaggcggtcatccgcgctcaggctcagctcgcgcggcagggagagcatgcccgcccagccgtcctgctgctccggcagcggcgattcccacatatccagccagccaatcacgatccgccggccatcgggggtggagaagctttgcggggcatagaaatcgtggccgttatccatctcccggaattcgccatggcgaataaaacgctggcctggctgccactcgccgatcagatagccgctctggaacagattgcggttgctgaaccccgcggcctgcatcccctgtggggaaaacatcagaacgcgtttgccgttgagggtgaagaagtccgggcactcccacatatagcccatggtgctttccgcttcatccagcacccccgcgtcctgccactggcgcagatcggctgaacggtacagccgcacctggccggtatcgccttcgcgcgcgccgacgatcatgtaccagctgtctccttcacgccagaccttcgggtcacggaagtggtgcatacccggcggggtgtcgaccaccatcccctggcgctcaaagtggatcccgtcgcggctagtggccagacactgcacctgatacagattggcttcgtcgccaggatcgccgtggaacttatgcccggtgtaaatcagcgccagggtatcgccatcgaccaccgccgagccggagaagcagccgtctttatcctccgggccctccggcgccagggctaccggcaaatgctcccagtgcaccagatccttactgcgcgcgtgcccccagtgcatcggtccccactgggtggagtacgggtgatgttgataaaaggcatggtaccagccgtcgaaccacaccagaccgtttgggtcgttgatccacccggcgcgggccgccaggtgatagtgcggataccagcgcagattcagcgcctggcgttgtgtctggagtacctgttcagcccgggagattgtgtaagtcatcattttcactctttttgattcagatagcggtaggttgcgacaccagcggatcggcggaggatttgccggagcgcaacaagaagatggaaataaaggtggtgcagaacaccagcaggcccatgattaggtaggactgggcgaagccatatttttcatagctgtagcccgccagcggcgacaatacgctggcgataatcgagctggtgcaggcgaagcccaccagatagagggtggaggagagacgtttatcgaagttgaggctgttgtacttaaagatagccaccagcagtatcggcaactccaccgcgtgcagcagtttggtgatggagatcagcagcggcccctccaccagaccggaggccaccatgcgcatcgccatcaccatgccggcgaaaatcagaccgtttttggcgccgatgcggttcaccagccacggcgcgcagaacatgccggccgcctcgaggaacacctggaaggagttgaggtagccatacatctcattgccttcctgcagggtcgcgaactgcgatgagaaatagaccgggaactgctggtcatagacgccgtaaatgcaggtgccgatgacgaagaagaccagcgcccaaaagcgcggcagcgtcagcaggcgcagcgcatcttcgagggtcaccttaccgcccgataccgcctcctgcatcgcatgcggcgccgaggagacccgcagccgcgccaacaggataaagaacaccagcccggaacagctggcgacgaggaagtttagctgcggattgatgttaaacagcaggccggcgaagaaggtggccaccgcccagcccagcgagccccacatccgcgccctgccgaattcaaactggctctgacgcgccaccctctcggtgtaagattccagcacgccgatgccgccgttaaaggtcaaaccgatatagatcccgccaaagatgctgcccaacaggacgttgattttcagcaggtggccgaacagcagatacgccggaccagagaggatcagcagcgcggtgatataccagagcagatgtttgcgcagccccagcttgtcctggataaatccatagcaaacttgcgcaaacagcgcggaaaccgacagtacggcatagataataccggtatcgccagccttcagcccaacctcctggtgaagccagatagagagcaaggagccggatgacgaccaggtcacgaaaaagaaaaacagtaaggcactgagcaacgggtagctgtgtgagtgaggcgctttcatcatgacattctcgtgttagaggaatgcaattatggtaacgttaacaaaaaacaaaacgcaggtggattcgctgcgatatatgatgttaatcacaaaagttaacgttaacataatgaagatgcgatcgcgatcaaaaatcaaccgcaacatagctcacgatggcgatagcagaaaatcgtttcactcttttacatcagcgacttagttgtatagcctgtactctgcggcaatggcggaggaaaaaatggcgtccctgaaagatgtagcaaaactggcgaatgtatctctgatgaccgtctcacgggcgctgaacaccccggagcggctgaagcctgagacactggcccgcgtgcaggccgccatcgccgaaaccaactacgtccccgacctgtcggcgaagaagatccgcggggcgcgcgcaacccccagcaccatcggcgtgctggcgctggataccgtgaccacgcccttttcggtggagatcaccttatcgatcgaagagacggcccgcgcccacggctggaatagctttgtggtcaatatgttttctgacgatcgtccggaagcggtggtcgacctgctcctctcccaccgtccggacggcattatctttaccaccatgggcctgcgccaggtaccactgccggaaaaactgctgactctgccctgcgtgctggccaactgcgaaagcctcagccagccggtggccagctatatcccggacgatgaacaggggcagtacgacgcggtgaaagccctgcttgccgctggctatcgtcgtccgctgtgcctgcacttacccgccagccagccggcgacgatccgccgccgcctggggctggagcgcgcctgccgggaggccggtatcgaaccggaccatctgagccattcgtatatgggccagggcgatgagcattaccacgatatcccggcggtggtgctggcgcatatccgcgagggtaaacctggctttgactcagtgatctgcggcaacgatcgcatcgcgtttatggtctatcagacgctgctgggccaggggttacgcattccacaggacgtggcggtagtgggatacgacaacatggtgggcattggcgatctgtttctaccgccgctctccacagtgcaattgccgcattatgacatcgggcgcctgagcgccctgcatatcattcacggcgacaaccatcgggagacgcgcaaagtcgccagcccgtggttgccgcgcgcctcacattaacgattaccgatgttgcgcagcttctcgcccgccatcaggttgcgctcaatgtgctcgagggtgacattcttggtttccgggatcagccagaaggtgatgccgataaaggccacgttgagcgccgtgtagagccagaaggtgccggcggcgccaatcgcgtcaagcagcgtcaggaaagtggcgccgatgatcatgttcgacacccagttggtggtggtcgagcaggtgataccgaagtcgcggcattttagcggctggatctcggagcagaggatccacaccaccggcgccgcgctcatcgcatacccggcaatacacatcatggtcatgccgacggagagccaggagaggccgctggatgcggtgccattgtcgaactgcatcaggcagtagcccagcaccagagtgcccagcgccatcacgctaaagccgattttcagcgctggcttgcggcccgctttatccactgtgaacaccgcaataaaggtggcaaacataaaggtcaggcccaccaccagggtggcgatcatctgctgttcagtagtggtaaagcccgccattttaaagatacgcggcgcatagtacatgatgatgttcatgccggtgaattgctgcatcgcctgcagcagcatgcccaggaacaccgcccggcgcacgttacgattgaccttaaacaacgcccaaccgccctgcttcagcttgaggctctcacggatctcgttaagctcgtcgcgcgccttttccgaagtatcgcgcagcatccgcagcacttcttccgcttcgatatggcgtcccttctccgccagccagcgcgggctgttcggcaaaaagacgaccagaatgatcagaatcaccgccggcagcgccagcacgcccagcatggcgcgccagttaccgctgtagctaaaggcggtatcggaaagaaacgccagcacaatgccaagggtgaccatcagctgatacatactgatcattttcccgcgcacgttctcgctggccatctcggagaggtacagcggcgcggtataagaggcaatcccgactgccacgcccagcaccacgcgggccaccagcagcacctccacgctggcggcaaaagcggatccgatagagccggccacaaagagtacggcccccgccatcaggctgtatttacgaccaaggcggaacgacagccagccgttaaacagcgcgcctatcgccgcccccaacatcatgctgctaaccacccactcctgaagctggctggataaggtgaaatggtcggttataaagggcaacgctccggatatcacgccgatatccaggccaaagagcaagcccgccaccgccgcggcgatggaaacaaaccagttcatccgccgggtatcacgttgcgtccgcggcgataatgtagagtcgttactgattgaagtcatttttttcctgccacacagagtaagacataagacgaaagtacgtgactggtggatgaatgggtcaggcaggataagccaaagatatggactatattgctggcaggatgggttttgtgatggacattaaactttcaaagtaacaaaaaatgcgtttccaatagttaataaccctgtttatacagagcggtaacattatacccgtattccggagtatggacgatccgcacttttgcgtatggacaataattgctcagatggccggagcgatacgacagaccccggccatcgcggacggttagcgcgccagccagccgccgtccaccgccaccgtgtagccattgatgtaatcggaggctgaggaggcaaggaacacgactggccccatcagatcggccggtagcccccagcgcccggcgggaatgcgatcgaggatttcgctgctacgctgctcgtcggcgcgcagctgctgggtgttgttggtcgccatataccccggggcgatggcgttgacgttgatgttgtgtttggcccactcgttggccagcaggcgggtgacgcccatcaccgcgcttttggatgcggtatacgacggcacgcggatccccccctggaacgacagcatggaggcgatgttaatgatcttcccgccgctgccctgggcgataaagtgtttcgccgccgcctgggacataaaaaatacgctcttgatgttgaggttcatcacgtcgtcccagtctttttcgctgaacgccagcgcgtcctcgcggcgaatcaggccggcattgttgaccagaatatcaatatggccgaactccgccaccgcccgctccagaagctgaggaataccgtcgatctggcgcaggtcggcggtcaggctgagaaaacggcgtcccagcgcggttacccgctcgatagtctccaccggttcgacgatattgataccgacaatatcgcagcccgcttccgccagcccgagggccatcccctgacctaaaccggtatcgcatccgctcacgacggccacttttccctgcagggagaatgcatcaagaatcatattatgttccttagtcgttcagagcctgctgtttgcaggcaaggttctctcggcccggtccgcgccggcggcgcgactgagcgtggggcgaactctcgggcatagcccaccataatgaaaataaaacagagttccgttttgctgatgggtgccatcttagccccgcccccagccattttcaatattatttaaaacgatgtttcattttttatgatgacgattacaaaaaaagaaaaagcgaaggagcctcccggcacgcgccaggccggaaaaggttttgaaaagatgaagattctaccgattgtctgcagaggtgccgaagcgaagccagcagcccgctgaaaacgcgggaattacgctgaactgcgtgagccatcacaaataatgaaacaatgttttgataaattaatacctgtcttttaaaacatatcactcagcgacacgcctctggtccagcggcatcgcaggaaagaaaggagcactacatggctaaaggcatgcgggtcaaactgaattatcacgtcagccacgatccggataccggggcggaagtcacccgcttaacccccccggaggtcacctgtcatcgcaactacttctatcagaagtgcttttttaacgatggcagccatttactgttcgccggcgagtttgacggccactggaactactatctgctgaatatcgccagcgccgaggccgtccagctaaccgaaggcgccggggataacaccttcggcggcttcctctccccggacgataagtcgctttattacgtgaaaaatgaccgtatcctgctggaagtcaacctgaccaccctcgccgagcgcgaagtttatcgcgttagcgatgactgggtagggtatggcacctgggtggcaaacagcgattgcagcaaactggtgggcattgagattgccaaaagcgactggacgccactcaacgactggcagattttccatgatttcttccataaaggaccgcactgccgcctgctgcgcgtcgacctgcgcagcggtgcgagccaggtgatccatgaggaaaaaatctggctgggacacccgatctatcgccccttcgacgaccataccgtcgccttctgccatgaagggccgcacgatctggtggacgcccgcatgtggctggtcaacgaggatggcagccatgttcgcaaagtcaaagcgcatgctccaggcgaaagctgtactcatgaattttgggtgccggacggttcggcgctgatctacgtctcctatctgaaaggccagcaggggcggacgatctatcgctttgatcccgaaagcggcgtcaacgaggccctgatgacgatgccggcctgctcgcatctgatgagcaatttcgatggcacgctgctggtaggcgatggctcaggtacaccggtggatgtcaaggataccggcggctactccattgataacgatccctggctgtatgtctttaacgtggcggaaaagcgctacttccgcgtcgcgcgccatgatacctcgtgggcgacggtggccaacagccgccaggtaacgcacccgcacccctcatttaccccggacgatagcgccattctgttcagctccgataaagacggtaaaccggccatctatatcgcgaaattacccgcgcacccgtcaatgctgagcgcctgatccacgccacacttttttctgtaactggccttgccctccttcatggagggctttttttgtcccttctctttcccccataaaaaaaccccggctgacggcgccggggaaaacaaacgatgagggatgaatggtcggtcagaacgagtaggccaccccaacgcggaagcgggtctggcgatcgctgcggtcattgaccccgacgttgccaatttcgccatacggcgaccagttattatccagcttataggccaccttcacgttatattcctgcgagtagggtttattgtcgttgcggctgaccccttccgagctgcgggcatagacatagttcagctctgtacgccagtcgccgaggacaaatccggcccacgcgtcgccgcggttaactttgtcatcatctttgccggcgttgttcggatagcgggtgtattcatagcgatagcgagcggcgacatagaagccgttgtcgaaactgtactgcgcgtgcaggtgcggcttgtagatggagcggctgtcgttgctctcaatggtaaacccgggggtgaggaacaagttcgacgtcgctttccagcgccagctgatggtgtcttcatgaccattgcccaccacgtccgaatagggttgcgaaccgttgtcgccgcctgagcgccatttggcctcgacggtaaagcctaagccgttggcaaagcggtgagaaacggagacgcggtcagcattacttttatcactctttccgccatcaataaattcatgacgtaaatctatcgttaccgcggttgctgcaaaagacataccgcagagggcggcgagaaccagagagcgttttaacatagggtacccttacaataaataaaatgacatttcgtttttatgaaacatcattttattttttaggcaccatagttttagtgaccaggatcgtagttatttgtttcaaaaaaggtggcacaacaagacgtgacgaagctcaataatttcgccggggagagtgaaagagggagggaaaaataagggttcggcaaagcacggcgcataaaaaaggcctcccgcaggaggccatggaaatcgaggtatagcgctatgcgcgttctaccgccagcgccacgccctgaccgccgccaatgcacagcgtcgccagacctttgcgggcatcgcgcttgatcatttcatgcaccagcgacaccagaatccggcagccggaggcgccgatggggtggccgagggcgatcgcgccgccgttgacgttgacccggcgctcatcccactccagtacccggccaaccgagatcgcctgagcggcaaaggcctcattggcttcgatcagatcgacgtcgtccagccgccagccggcccgctccagacagcgacgggtggcatgcaccggggcaatgcccatcagcgccggatcgacgccgacgctggcgaaggcgcggatccgcgcaaggatcggcagccccagctccagcgctttagcctcgctcatcatcattaccgccgccgcgccgtcattgatgcttgaggcgttgccggcggttaccgatccaaggcgatcgaaggtgggctgcaggctggccagcccttccgcgctggcatccacccgcggttgttcatcggtatccacggtgcgcgccgcgccgttatgctcggtgacaaccgggacgatctcatcgcgaaagcgaccggaatcaatcgccttgcgcgccttatgctgtgagctgagcgcccaggcgtcctgcagctcgcgactgatgccaaattcccgggccaggttttccgccgtgacgcccatatgataatcgttgaaagcatcccacagcccatcatgcaccagactgtcaatcagctgggcgccggtgcggctgtcggtaagcacatgcggagcgcggctcatattctcctggccgccagcgatcaccacgtccgcttccccgcactggatcgcctgggtagcgaggtgcagagccttcaggccggaaccgcagacatcgttaatggtgatagccgatacggtgttaggcagcccaccgcgaatagcggactgacgcgccggattttgtccggtccccgcggtcagcacctggccgaggatcacctcatccacgctgtgcggatcgattcccgtcttctccaccagcgccttcaccaccacgctccccagctcgacggctgaatggcgcgataatgcgccctgaaagcagccaatcggcgttcgcagcgcgccgacgatcacgacatccttcatcctctacccctgcccatgcatttgcgcaaagaaacagcgatatactagataattgttatcaaaaaactttgtaattgtttaaaaaaagtgaagccaatcacaaagaaatagctattcgttaacgttcacgccgctgcagatgctgacgcagccagctgccggccgctcccggcggcgctttcttattccacagcagatcgactgaaatcgcccgcggccagccggggatatcgagcgccaccagcccgccctgcggcgcaaactccgccaccagcgcgctgggcagaatgcaccagccgaacccctgcgccgccatgctgagcagcagcaggtagtttggcgccgaccagacctggcctgcggcaggttcggtggcgctggccagaaaggtgctcaaacgcagctcgcgccagctgcgcagctcatcccaggcgaccttaccctgcgccgccagcggatggccaggggctacataaatgcccatcgccgtctgcagcggcaggcgggtgctgccgatatcggtggggtagcgctccctcgcctcaatcagccccacctgggcgcgggatttttgcaggagatcgatcacatcctcgtcttcgccaatcaaacactcaaactcggtatgaggaaagcggcggtcaaactgcaccagcagatcttccagcacgtccgggtgcagagtatcggagagcacgaaggtcagccgcggctccgtctcgccggacagcgacacagccagttcgtccagccgctcgctggcggcgagaatcgctttgacatagctcagcacctgctccccctgcggggtcagcgtcggttgccgcgttgccctgtcaaagaggattacgccgagatcggcctccagattggcgatggcggtactgatcgtcgactgacttttccgcagacggcgggcggcggcggagaacgatccgctgtcgaccgcctcgacaaaggcggttaaggcttccggtgaataacgcatgatgtatctacaatatcgatgggtcctatcttttgtttatcatatttttccataaactgccgggtaatttcctgttcaggctaaaactggaggtagctcgccatgcaacagaccccacatcagcgcaagacgctcaccgaacgcgttatccacgccatcaccttcgaaggactggcgacgctgatcctcgcccctaccgccgcctggctgatgcagcgctcggtagtggagatgggcggactgagcattctgctcgccaccttggcgatggtatggaacattatctataacgcggcgttcgatcgcctgtggccggtctcccgcttcccccgccagctgaaagtacgcgccctgcacgcgctcggtttcgaaaccggattcgtcatcattggcgtcaccatggtggcgatcgtgctgggcgtctcgctgctgcaggcgtttatgctggagatcggttttatgcttttcttcctgccctacaccatggcctttaactgggtatgggacaccctgcgcgagcgcgttattcgtcaccgccgcccgcgccagacggcgcgcggttaatcccggcgcggatcttcgacgatccgccgcgactttatcaccaaaaactatcgcaacagacgaaccataaatatggtaaattgcactccttttttttggtttgacggttgataaagtcgcataatgtctaaaatttggtctaaagaagaaactctatggagttttgccttatatggcactgcagtaggcgctgggacgctatttctaccgatccagctgggttcggctggcgccattgtgctgttcatcaccgcgctggtcgcctggccgctcacttactggccccacaaagcgctgagccagtttattctctcggccaatatcgcgccgggaaccgggatcaccggcgcagttaatcactactatggtaagaaaattggcaacctgatcaccggcctctatttccttgccttctttgtggtggtgctcatctacgccgtggccatcaccaactcgctggccgaacaggtggcgcatcgcacgccgatgaccccagggctgcgtgcgctgctgagtctgggggtcgtgctggtcctcaacctgatctttctcatgggacggcaggtcaccatcaaggtgatgggctttctggtcttcccgcttatcgcctgtttcctgtttctctccctctatttaatccgcgactggcatccggagcatctcaccagccagatgcagttcagcccgcagacgctccaccaggtctggatctctattcccgtgatggttttcgcttttagccatacgccgatcatctcgacttttgctatcgatcagcaggagaaacacggcgacctggccatgggtaaatgcaaaaaaatcatgaaggtggcctacaccatcatctgcgccagcgtgctgttttttgtcttcagttgtctgctggcgatcccggcaacctatatagagaccgcccgcgatcagggggtgactatcctctccgccctgtcgatggtgccaggcgcgccgggatggctggcggtgaccggcatcatcgtcgccgtcgtcgctatgtcgaagtcgtttctcggaacctacttcggagtgattgagggcgccagcgaaatcgtcaaaagctcgctgggcctgctgggcgtgcgtaagagccgcgctttcaaccgcgcgatgtcgatcctgctggtctccgccttcacttttgcggtgtgctttatcaacccgaatgcgatctcaatgatctacgctatcagcggaccgcttatcgccatgatcctgtttattatgcccacgctgtcgacatggctcattccggcgctgaagccgtaccgctcggtgggtaacgccattacgctggtggtaggcctgctctgcgtgtcggtgatgttcttcggctaatcccctctggcgacagcggctgcctgagctgctgtcgcacattctgacaatattctcccccttgccttccttgtgagcggattacacttacggcttagccaccgtgaggagagttcttatgtccagtgtcaccttatccggtcgcggcacgctcggcgatcgccaggtctatcgcttaggttatggcgcgatgcagctggccggccccggtgttttcggcccgcccaaagatcctgaagaagcggtgcgcgtactacaggccgccgtcgaggccgggataaaccatatcgatacctctgatttctacggtccacatgtcaccaatcagttgatccgcaaagcgctccacccctaccctgacgatctgtgcattgtcaccaaggtcagcgcccgccgtgacgagaaaggcaactggctaccggccatgtcgcccgccgaactgacccaggccgttgaagacaatttgcgtcacctggggcttgaggtactggaagtggttaatctgcgcagtatgctgagcccgcacggcccggtggagggttcgctggaggcgccactcgccaccctgctggaactgaaagagcgaggattaatccgccatatcggcctcagcaacgtgacggcaaagcaggtcgcggatgcgcagaaaatgacgcccatcgtctgcgtgcaaaacctttataacgttgcccatcgcgccgacgacgcgctggtggatgcgctggccgcccagcacatcgcctgggtgccctttttcccgctgggcggttttacgccgttgcaggcgcaggagttgaacgaggtcgcggcttcgcttgaggcgacgccgatgcaggtcgccctcgcctggctgctccagcgagcgccaaatattctgctgatccccggcacctcctcccgcacgcacctcgcggaaaatattgccgctgccgagctggtcctgcccgcggaagcgctgcgcaccctcgataatatcgccaccgccgcgcgccgctgacctgccagacaaaatggagggaaccctatccctcctcaatatttgcctggaaaaacctcaccgctactggcactatagatcctacaaatggggcgtgatcgacgatcgttctctcattatccccgttaattaaacttaagtttttatccttcgaccggtctccagcttggaggccgttgtcgtttttgtcatgaccaaaattcgaaactcttgattacaggaaatacaatatcaaattccaagtttatacatatcaatctggctgcaaagatagtcaataacatcaaacgctcataaaaacatctgattaacccaatcagaatgttgctattgctataagaaaaatcaaacgcctcacgacaactatttacaagggatgcatatgacagagggaacgataaagaccagtaagtatgaaattattgctattttcagagaggagttgcgcaaacgtactgaaattgaaatattttttaacaacaccagtatcataacccaactgacgcgcgtggactttgccgagtttcatattcagacccatcgcaaaatcccgtccgggcataaaattcgctttctcttgcatagcgattcagggaaaatagagtttaatgcggccctgacaaaacatgacaatagcggtgtcgataaaggtatccgctacgctttttcattgcctgaatgcctgcaggtagtgcagcgtcgccgcgatccccgctttcgtttacgccatgagcatgacttttattgccgcggccgccataaaaacggcgaaaactatcttttcgatatcaaagacatttcagatggcggttgcgcattgatgaccaaaacgccgaatcttaaatttctcagccacaacgccttactgaaaaacgccgtacttatgcttgcagaatatggcgagatcaccatcgacctggtggtcaaaaatgtcattgttatcaccctggataacgctaatgaagagagtgagagctactatcagatatcctgccagtttaagttccgccatctcgatgaccagcgcagaatagagaagatactgctggacctgatcttagaagccaagcgcaaaaagagaatctgacaaccttggacagtatattgctgtacaccaatgacaatctcattggtcactcaatctatcactaccttattgatagccatgaaaatgccacccgtctgagttatgccgatgtcatccatgagaaacatctgccactggcccagacgattattttcaatttaattaataaggatatttctgccatcagaatcgtcgatctgctgaatgcgctccgcctttccctgctgcgctgccagcagccggtgctaatggtgaaaagcgacattgtcgggctgtgcagagagttgataaactttgacaacgctatgattattagtgagaaatctccgctaactcttttttcatctatcgtccagcgcgccaaaggcgtcagcgaactgccgccgcgaggattgcgcaaacagctttcaccacgggagtgtcagatcctcgaactgctcattgccaacaataataataagcgtattgccgccctgctcggcattgctcataaaacggttcatagccaccgcatccatatcatgcaaaaactgggtattgataactcccgcactatgaatcagcgtattgccgctctccatcaatgctaaatgttctcccggtaaatcagtagcggataaagcgtacttattcgctgttgatttacatttcccgccattcccattaatcatcaggtagcctataattaatgtatcctctgcctattgtctgactaacctcgtgaagagggataatgaacactaaaatattcgaagacaacattttatctcgtaatgatatcgctgtacgctacgtctttcagaaaatgttttccccacaaggtactctggtcgcggtggaatgcttaagccgctttgataatctttctatttcccccgaagattttttccgccatgctaccgccgccgttcgtgaacgtatttttctcgaacaactggcactgattgaaaagcataaagcctggtttttacgtaaccatatttccgcaacaattaacgttgatgaccatatcctgaacctgttgcgccagaaggatataaaagccaaagtcgccgccctgacctgcgtccatttcgaggtaaccgaaaacgccgagaatctgctgcataattctcttgccgcctggcagagcccacaggatacctcactgtggctcgacgacttcggctccggctacgcgggaattaacgctattcgcggttatcactttgactatgtgaaaattgataaggattttttctggcacctgatgcgcaaagagtccggccgccagctgatggatgcgctggtgacctttttatcgcgcaaccatcataatgtgattattgaaggtgtcgaaagcgaagcccataaagaatggctgcagggaatggagtggtttgctatccagggacattactggcgggaagtcagtattgaacaactggtcgccgatgatattgccatgtaaaaaaagccgggaattcccggctttttaacgtcacttaattataaactaattcccacgttgcccagctggtaatcggcccgctggtggcgcttttcggcgttggcgaaacatagccaacgtaataggtgaacaggccgccgctgaccgcgctttcctgcaaacgcacctgattttgctgcgggtccgccgggacaattttattactcttatccagagtattattatcgttagtcgatagggccagataaatattctgcgctccatccggcaaggtattggccagatacccggcgttttcgttaccgaccgccgtcagtaaaaaaccatcgacccagcgcacgctgacccgacgcacctcatcctgcgaggctgctccaccatcatggcgcagctggcagtttgacagtgccagggtaaacggctgcggtttcataaacgccccggccccgcgatcgtggacttccgccaggctgaccggcgccagccagacattaccgctgccggcatgctggccgccgtttagcgcgacgctacaggaaatatccgtcacccgcccggcaaaatcgacccgtccgcgatcgtaattggtctcaaaaccccacgccgagggggcggcgaggctgccgcaaaatagcagccacgcgatagtgtttttcggcaatcccttcattccccctcccgtattaatcgtacgtcaggttaaagatcatatgcgactccacctcgccggtgctggtcgtcgggccatactgataaaaacgcgcgtgcagcggtatggtgatgtagcgggtctcctgattattcaagcggccgacggtgtatttcttattaaactgcagcggggagccatccttcagcacctggatgccaatgcctttcgccatcccgctgccggctttttcattcagcaaggcgcccatggtagcggtagtgcttgtggcaagggtaccggagaacgaggtgctaatgttggcatatcccgtttcactcaggccgccgctgcactgcaggtcgatattaaaatccttcccgccggcggtggtgccgacccctttcaggtcggtgcgccggatggaacccacatcgacattcatatttttcccgctcagcaccgaacaggagggcgagaccacggtgatggcgttggcgctcagataggtttcgaggatcgggttaccgccgctctcccagtcgtaggaggtgtacttacccgccgccagggtgccgctgccggtggttgccgcggttttgataatctgcagcgtaaagcgcgacccttcgagggaatagttggtggtgttatatacccgggacgaaaagacgtcgggatagacgatatttaccgttgcgccgccgcggctgaaacgcatgccgattcccggcacgttggtggagtagattttatttccaaggtccgtggcccctggcgacacgatcttcgccgcaaagcggttggtgccggaagtacagcgatagcttgccccgccgggagcgctcatcgtccagtcgcgggtaaggatcaccgagcccaccggcagatccgggggcaccaccaccctgcccaccaccatgtccagcatcaccgttggcgatgagagacgcgtacaggaggcccaggacgaggtggttcccagcgccattaagacgataaaaagcgttagtaatttcctcagcgacatacgctatcctttgttgtttgctgtcccagatccaccgaacactgcccgccgctccacttcacaatcgcgcgtttggcgttcgcatcgctgataaacatcatgctgccctggccgacaacgccgatctccttgccgtcgggggagaaaatacttgccgcaaacggcaacggctcgtggttcgcctggcgcgcctgcagggtgaggttgttctgcaccttagtgccgaacgcgaccttaaccacgctgccttcccacggcacaacctgcgccacggtgcgatcgaaggccacgtcgtcatggctgcctttcgggtcgatttccacggcgttaatccggtacgggcgcagatacggcaggatggcgtaaccattgctgtccacacgggtgcccggcgatcccggaagcatcgccccggccgcgtctttggcttcaatcagggccatcgtcgagccgctttccggtgagagcaccacgccgccgctgtgggcgatcatcgtcccgctggcgccaatgccgctctgacgatagccttcgccctggctgtagctgccgttgagggtggtccatggcgtacggtagctgccgttgagcgccacatcatgctgaccgccggtggcggtggtggtcgacacgccgtagttaaggttgttttcactgtccagcgaaccgttgataccaatctgcgagctggcaaagcgcgagttattgaacgaggtgttcgacgtcaggttggcggtgcggttatcgccaaaccacagcgggtagctgaagttgagtgaaatacgatcgtcgcgacgatgaccggagctgtctggcgtatagacgcgctgcgcgctcgccgaccaggagagacgaccaaatgaattgttgtagctgacctgatactgcttctcggtcccggagcggttccagtaatcggagatacggccgctgagataaaacccgccccagccgtccggcaggttctggttcaccgtgaaggtcatgccgtttttttgccgccacagggtgtagttgctgcgactatttttttcctgatcgacggcgtacagcgcgtcgttgaggttgtaataacctttcgtcgagtagcgatacgccgccaacacgatgctggtctgggtatcggtaaacatgcggttaaaggtcgcgcgatagctctgacccgagtcatcatgggcatcgctcttcaaccgcgaatgggtgacgtcaaaagagagcgcgccgatgccggtgttcatcccggtccccaccaggaaggcctgatagtcgtcaaaaccggtgaccccggtgtagccggtcaacaggttgttgatcccgtgctgccaggtcgcctgatagagcatcggcttgttgcgcagcgcgctgtcgtccactttaccggcggagagcgcgtagcgggtcatgcccgggcgcagcagctgggcgacggaggcgtaaggcacgctaaacacttctaccgagccatccgcttctttcaccgagacctcaagatcgctgccatagccggaaggatagacatcctgcagggtaaacggtccgggcggaacggtggtctgatagataatattgctgccctggcgcacggtgacgagggcgttgctctgcgccacgccgcgaatttccggagcatacgagcgcatgccgtccgggaacatattgtcatcggtggaaagattaaccccgcgcagaccgatggtgtcgaaaaattcaccattggtgaaaatctgcccgccgctgacgatggagttgagctgtgggatagggcgctggagataggtctggttgctgttccagtgcgctttaccctgctgctgctgccagttcaggttgccgatgtgcttcagcagccagccgtcccacgacagtccggcgttgacgcccagataggcgctgctgttatccgacccgcctaccgaagaggtatggctgttccaggcgttcgccatccagccaagattgagcgcggtaatacctttgtcccagaactccgggctgacatagtttttcaggcgttgatcttcatagatctgcggtaccgaaatgttcaaccgcagggaggactggaccaggttgtctttgacgttttcttcgttgcgccaggatttgaggctaccgcagtagccctcctgctcgctcagctgcggattgagcttttccgccgcgatgccatattgggccagcatcgctttggtgtagcagacgcccagccgaccatctttatcgcgcgcgatgcgtaaatcgtagcgccctttccactcgtcgttggtgtagacgtcaagggagtaagtgccttcggtaatcgcgctggtcgaaaagcgcgacagatcgaccttttcgcgactgccgacaataaagccgtcgttaaactgatataccgttcccgggttttcctgtccgctggaaaatggcggaaagcagcacagcgcgatggcgatcgcggtgcttaatcttcccgggcagaatgacctctgcttcattagcttttcccttatttaacggccactttcactgcgacatcggcgccatagtcattaatgttgttaacggtcagggtttcgccgcggttgacggcggaggagagcgccaccgtctggctggactgcggcgccagcatcacggttttgctgttcagggctttaccgccgtcgcgggaaatacggctgacggtaatgtagaacggcgtcgggttgttgatggcgagactactgccgctggcggtcagggtcagcttctcggccgccgcatcgcggttgcccagtccggcaggacgataaataaatttaaagcgcgaacggatcgccagctgcagcacgttctggccttcatttttctgattggccaccaccggcggaatttccagcagattcagccaccacagcgtctctttatctttcgccagaccggcgctgctgccgagcttaatacgcagcgtctggccgctcttggcgtcaacgcgcgaaatcggcggggtgataataaacggggtggtaatggtatccggtgtggcatcggcatcgccgttatccagccaggcctgcgccagcgccggacggtcggcgttatttgaaagctgtaccgttatttctttttcatttcctggataaataaagcgggtaccgttaacaataatattgttggcatgggccgcaaaactaaaaatgaaacagaaaaaaagggcaatacgcttcatgctgacctcagaataaaaatacaagcggcggacattgccgctttattattgttattaactgccccatcgcggggcagttttattttctgacggaattactggtaagtaatttcgtaagtcgcgtagctgttaaccacaccggtggttaccgtggtcggcgcgctggtggcgtagcctacgtagtaggtgaaacgcgcgccatcagctacagcggaagcgtcgcctttcgctttcggctgagtgctgtcacccgggatgattttgttggtcagcgcggtagcgttgtcagtagacagcaccagctggatgttctgagcaccggaagcttcggtgttcgccaggtagccctgttgtttgctggttgcgccagccagcaggttaccgccggtccagttcacgcccagtttgcttacgtcatcctgtttagtgccatcagcagcctggcagttagagacgtcaatggtgaaagatttcggtttcaggtaagtatccgctgctgccgctttaacttcagtcagggttaccggagacaggtaaacgttcgcatcgctgccctggccgttaacggaaacagtacaggatacatcggtaactttaccgaagaaattaacctggccgccgccaacagtggtatcagctgcatgggcagcagtcatgccaaaaaacgcggttgccattgctgcagagagaagaacctttttcattgccatttccttgtcagagtgaattacgaatcaatgagcacactgtgaattcgcatagaaccagaaacatcaggcgatgctgatttatgccactgctaatagaatcttcgactgaccgggagccgcaatatttaaggcgtcaggtaacgaacctaaaaatataagttcgctggtgctatcggcgtcaaagaatgctatttattcgccgacaaatatacatttgttcacgtttcattaagttatataacagataaccatcgactattaataaacagccattgatagatgaaaacgcgagggtggttgtttacagcgcagcaagcctaacgccagagcgagagaaagtgaccgcaacagcatgcagaaaaagccctcggaaggccatcgcgataagtctgaatctgcctttgcggtggtgaaaacagcaccaaaccattcacacaacgaatggtgaaagcatgaatgaggcgcattcctctccctgaacaagggcagcccatgtgatcccccctttcagaaacaaatcattaatccattgtttttaaactaaaaaatagataaacgatcatgtttacgccatcaaaccgccataaaaatgtgatctaaatcgcactttttgccacgcgcgttatagttagcaggcttattataagtccatcgaaagcaaacatgctttccaccataaaagttaaaaggacaaacaccatgaaaaacgtaaaattactcgccgctgccggtatgctctccctggtctctttcgctagcttcgctcatccggtgagcgtgacagcagacaccctggacagcgcagaagcgaaaatcgcaaccattgcgaaagaacaaggcgcttcctatcacattaccgaagcgtacaccggcaaccaggtccatatgaccgccgagctgtctaaataagcgaatggttgcagagggagctgccggacaggccgcctgcgggtggctggtctggctcccgccgcccaccccgcacgcagcaatgtcgagccccgttacggggcttttttcgtttttgctcccgccgcctgacgcgccagcgcgcgctggatagacagcacgctcgccagcaccacgatcaatcccatcagcgccatcccctggatcttttgtccgaggaatatccatcccagtaccacggcggtcaccgggctcagcagactcatcgccgacacggccaccggtgagaggcggccaatcccccgaaaccacaggccataggccagcatggcgcccgccaggcacagccacagatagccggccgcctgcagcactgttacctgatgcaaaggagggtcaacgatcagcgccaccggggccagcaccaccccaccgatcgtcagctgccagccggtcagcgcgacgatcggcagggagagcgcccagcgccgggagagccaggtgcccagcgccatactgatcgccccgagaaacgccgcgccgatgcccagcgggtcgagtacggtgtgcggcgacagcagcagcatggccataccgagtatgccggcgatggcggagaacaccgccagccagggcgagcgctgccggtcgacacaccaggcgaggagcatcaccagcagcggctggatcgcgccgatcaccgccgccagcccgccgggtaagcgataggcggcgataaacaacagcgcctgaaacgcgccgatatttaagatgccggtaacgatcagctttgcccattcgccgcgttgcggaaaacgacggctccagatcagcagggcgatacctgccggcagcaccctcagcagcgcagcaataaatgggcggtcagggggaagaaactgggaggtgacgatgtaggtcgtcccccagatagcgggcgccagcgcggtgagcagcaggtcgagaatcagattacgtgagagaaaagccatgattttatcttcacttcaaggtaaattagtgagtgaagtatgtaccgccaagtatcttgatatcaagacaagtgagcactaatggacaaatcaccgccgatcgacgccgtggatcgcatcctcgcccagtggcagcgggagcggccagacctcgactgcagccccatggggccgataggtcgcctgaaacgatgcgctatgctgctggagccgcaggtggaagtggcctttacgcgccacgatctggtgcgctgggagtttgacatgctggcgacgctgcggcgcgccggagcgcctttcgtactttcgcccacccagctcttctccacgctgatgattacctccggcaccatgacccatcgtctgaaggcgctggagaaacgcgggtttattacccgcctgcccaatccggaggatgcccgcagtatgctggtcgccctgacttccgccggacgcgaacggatcgatgccgcagtggaaacccacgtcgacaacgaacggcaactgctggcaggactcagtgacggtgaacgccagcagttggatcaggcgctgcgggtgttgatgcgactgctggaaacgggctaacagccagcggcgataaagtcgccgttggcgctgatcggcaccacgctgaaaaacaatcccacggcaaagaggatcagcgccagaccgccgaggatcttcaccaacggtaccagccagggccgcgggcggtgattcgtgaccaatcgtttgaccgtccgatggcgcgcatagtgaaccagcagcgacagaccgaggatcgagagcgcggtgcccagcgccatgctcatcaccgcggcgatgccccagctaacaatccccaacgcattggcgaataataaaatcatgatcgccccgctacagggccgaacgccgatagccagcaccacgccaaggcgcgtcttccagtcagcgccctgcatatcctgccccacgccgtgatggccgcagccgcacgaggcgtcatgctgatgcgctggcgtcagacggcgaatcacctgttttgtcggccacaggctttgcagagcgcgaaagataacataagccccaaagacgccgatggtcagggcgctgatcttctcgacgtaccagcggctggcgctaagatcgccggcggccagattcagccccaccgcaagaataaagacaaagagtatcgcagtgacgccctgcaacaggctgccgagaaagggcaccacccgcgccgccgtcaggctctcctgattggtgctcaggtaggtcgtcacgataaatttaccgtgtcccggtccgacggcgtgcagcacgccatagagaaaggcccccaccagcagccagataccgccgctgtactgatggttattcagcaacagaaggtacatcaccagatagcgatgcagggtaatttgggtggcgagacaccactggagaaagtcaccccagtggctgtgcaaggtgatagcggcggccagcagtagaaggccgccgcacccggccgccagcaggcgccagtcgcggagcgcaatcggagtcgtcatcgttataccattgtagtaaacgtaaaccgcctgacagcaactttacgacaggcgagcgaaggtgtcagcgctgaagggtgaggaatttgtcgaagctgttcacgggattgttcgtagtcaccaggctccgcattatctaccgatcgctatcttcccgacaccgtattagcgcagaatgcctcaagatcttgagcataccacagctatatctttttatgcgttattggttaccaataccttttaacaggaataattactcaaaaaatcacagataaaaataaataacttatttcttggcgagcattttttgtcagttattatgctgcgcttccggcaagaatattctttaactgctatttattgtactcttcagcaggatcacttccatgaaaagaggcttacttaccctggttactgctgccatcgctttccgtacaggccacctggcgcagcgacaagcgccaggaggcacgtgacgaaaagtggtgaaccggcaggcttcggcgtatcctggatgtgagtccttcccgcgccgaagcgagtattccaacccgccgccagaccgtgtcgcaatacttacctgtcctctactacctcccattgatatcttcctgtatacgttgaccgtgacgagttttcatctcattcaaccgcatgtaccagattaagcttacccgttgaaatacggcgtaatgtgctctattacagacaatgctattatcaccaggctttttgcagtatggtttaatcactgttgtagttttgcagtgaatgctatccagacgacttaaggttgtattttgtctgagaaatttctcatgccattcccgaaggttgtcggcgagggaggctggtttactggggtgacattgcccagtagacaggcaatcaatcatgacggcattgatagccgccttgccgtggccggaagcccaagccttcatcatcatgcgggtatcatcaagaggatcagggatgtacaggacgtggaaacccccaggaaagattcatcagttcagccagctcaccctttctttatccttcagatcgcggcctcttatcgttagcaatggagctagcccatgataccgctcgcgctcgtagcaaattaaaacgttatcaccacgctgtttcaaaataaaaaggcagtcaaatttaacaatgacctgacgcaggctcggaaaaccaaaaatatgcctgcaataaaagggaaaaccatgacgaataacgccgacataaaaaaaaggaacttcctgactcagaatgaaattgagtctttacttaaagcggccgataccggtccttatgctgcacgtaattattgcctgacgttactgtgcttcatccatggtctgcgcgccagcgagatctgtcgtctacgaatatcggatatcgaccttgctgcccgatgtgtttacatccatcggctaaaaaaagggttttcgactacccacccgttgctggataaagagatctacgccctaaagcgctggctggccattcgcagcagctggccgcaggccgccagcgaatggctgtttctctcccgcaaaggtaatcccctttcgcgccaacagttttatcagattatcgcgtcctcagggggactggcggggctgccactggagatccacccgcacatgctgcggcactcctgtggctttgcgttggcgaatatgggaatcgatacccgcttgatacaggattatctcgggcatcgcaatatccgccacaccgtctggtataccgccagcaatgcgggacgcttctatggcatctgggacaatccccgtgacaaacagcgatcgtcgctgatccaatagccttgacgccacggatggcgttgtatcgcgatcggtcgacaaattaaaatattcatgattattaaccctgcgttaattaggattactgttcccacaagttcttatttaatccttattactgagagttaatataaccctgcgtttactcaggaattagactgggtatttattggtgggaaaaatttccgcggctgtgtttttaataacggctggtagtgaaaaatatcctttcattttatatacctggcggcaacccgcacagatactattgagccgatgattaaaatctttaaaattaagaattatcacccgacgatatttttagtgtctggcaatgtaatatgttatcaattcgtgattaatcatcttcaccctgtaccgttttagcattacagaacctatttcgtcatggcgtatggtttcgctgtgacggtcattcatacctattttcaggagcaactattgtgaaccgacgtcgttttctaaccgccaaagaagttcaggccatgatgcaggctgctcgtcagggccctaccggcgaacgggactactgcctcattctgctggcctttcgccatggcatgcgcattagcgaactgctggatctgcattatcacgatctggatctccatgaagggcgggttaatgtgcggcgattaaagaatggtttttcgacgattcatccactgcgttttgatgagcgcgaggcgattgagcgctggagcctggtccgtgccggctggaaagcggcggacaaaacggacgcactgtttatctcccgccgcggcaccgcgctctcccgccagcaggcgtatcgtattattcgctccgccggggaaaatgcgggtaccgtcacgcacactcacccccatatgctgcgtcacgcctgcggctatgaactggcggaaagagggacagatacgcgtttgatacaggattatctaggacatcgcaatattcgtcacacagtacgttacaccgccagtaatgcggcacgtttcgctggcatctgggaaagaaataatcttttagaggaaaaagatcagaagacgaaaaatgaaataactgattgattttaaagaattaaaaaaataacgaacaggtcaattggggccaaactgtttatatcataaaaatgttttgacatattttgcaactcaccgcgccatatttccgcaaaaaaaatcatatctcattgattattatctatttttaaacctgcaattactcaattttctctaaccatatctctgctgcaccggcgatccgtcgccaacgccatcgctattcctttcgcacccccttccaccacaccagattatattaccataaaaactaaatttggcagcatttaaaaccacagaataccaggtttacacaaaatacagatcatttatcccaacgagtcaaaatggccccaattgtctcatcggttgggcgaaaactgtgcagagccggcagccggaccactcggctgaaatctgaaatgcctggaaggcacaacggctgccaatccggttcgttatttcgacatcgttcaaaggaaaacagtatgaaaatcaaaacactggcaatgattgttgtgtcagccctgtcactgagctccacggcagctctggccgataccaccacggtcaacggcgggaccgtgcattttaaaggagaagtcgttaatgcggcctgtgcggtggatgccggctctatcgatcaaaccgttcagttaggccaggtgcgttccgcgaaactggccacggcggggagcaccagttcggccgtcggtttcaacatccagctggatgattgcgacactacggtagccaccaaagcgtccgtcgccttcgccggtacggccatcgacagcagcaataccaccgttctggccctgcaaaactctgccgccggcagcgcaaccaacgtcggcgtgcagatcctcgacaataccggtacgccactggcactggacggcgccaccttcagtgctgcgaccacgctgaatgacggccccaacatcatcccgttccaggcacgttactacgcgaccggcgcagcgacggctggtatagcgaacgcggatgccacgttcaaagtgcagtacgagtaagacccgagtcaggcagggaagctattcgggccaggagggcccgctctctattttcaaccggagtgaaacgatgcagggaatgaaatctggtctgctgctgctactgcctccgctggcgctggccggtaatcattggaacgtcacgctgccggggggcagcatgcgttttcagggcctgataatggcgagctcctgccgcgtcgaagccggcgatcggcagatgacggtcaatctggggcagatcagcagtaatcgatttcatgccgtcggcgaagacagcaacccaatccctttcgcgattcatttacaggattgcagtacggcggtcagccagcatgtgggtgtgacctttcacggcgtggctgatggaaaaaaccccgacgtgctgtcggtgggtgaaggtccggggatcgccagtgggatcggtattgcgctattcgacagccagggccagcagctctcgctcaatcgtccaacggatcgctggatatcactctaccgcggaccgacgacgctaaatttcgtcgccaaatatcgggcgaccggacgccaggtcaccggcggtgcagccaatgcccaggcctggttctcattgacctatcagtaattaatccgcagacaaacaggacaacacggtgagcagacaaggagataatgtgagaaaaacggcaacgatggcgcatggcttactggcaggatgtgtgcttttcgccgccagtatctttagcgccagcgcgcaggcgggcgttgcgcttggcgcgacccgggttatctacccggcgggacagaagcaggtccagctctcggtgaccaataatgatgacaacagtacctggcttattcagtcatgggtggaaaatgccgatggtcagcgagacggccggtttgtcatcactcctccgctgtttgccatgcagggtaaaaaagagaacaccctgcgcattatcgacgccaccaataaccagctgccgcaggatcgggaaagtctgttctggatgaacgtgaaggcgatcccttcgatggataaatcaaagctcagcgacaataccctgcagctggcgattatcagccgcatcaagctctactaccgtccgggaaaactggccctgcctccggatcaagcggcggaaaagctgacctttagccgtagcggatcgtcgctgacgctgacgaaccccaccccctattacctgacggtgaccgaactgaacgccgggacacgcattctggagaacgccctcgtaccgccgatgggcaaaaccagcgtcaagctacccgcggatgccgggaacaccatcacctatcgcacgattaatgattacggcgcgctgacgccgaaaatgaatggcgtgctgcgctaacccagaagcgccccgccgcgcgggacacgctgcgcatgaccagaagcaatgacagccgggcaacgtcggaccggagggataatgtcacatcggaaatatggactggatcatttaggttgccgaactgcccggcgcctggtatctccggcgctggcgctgtggctctgctcacagccgtttgccgcgcgggcggacctctattttaacccccgctttttagctgacgatccggcggcggtggctgacctgtcgggatttgaaaaaggccaggaggttccgccaggcacctatcgcgtcgatatttatctcaacaatggttttatgaccacccgggacgtcactttccaggccgatgcccagggtcacggtctgtcaccctgcctgacgcgcggccagctggcgagcatgggtgtggataccggtcgggtgccgggcatggcgacgctggacagcacggcctgcgtgccgctgaccacgcttatcagcgaagctaccacgcgcttcgacgtcggacagcagcgcctgtacctcaccgtcccccaggcatttatgggtaaccatgcgcgcggctatattccgccggagctgtgggataacggtatcaccgccgggctgattaactataacttcacgggcaataacgcccataacaccacaggtggcagcagccgttacgcctatctgaatctacagagcggcctgaacattggcgcctggcgtctgcgcgataacagcacctggagctacagcagcggcggtagcacctcatccaacgagaatcgctggcagcacgttaacagctggcttgagcgggacatcacgcctctgcgttcgcgactcaccctaggggacagctacaccaacggcgatgtcttcgacgggatcaacttccgcggcgcccagctggcctccgacgacaatatgctaccggacagccagaaaggctttgcgccggtgatccacgggatcgcccgcggcacggcgcaggtgtcaatcaggcaaaacggctacgaaatctaccagagcacagtgccgccgggaccatttaccatcgacgatctctacgccgcgggcaatggcggcgatctgcaggtcacgatcaaagaagcggatggctcccgccaggtcttcagcgtgccctggtcaacggtgccggttctccagcgtgaaggccatacccgcttcgccctcaccgccggggagtaccgcagcggcaacagtcagcaggaaacgcccgattttttccagggcacggccatgcatggcctgccggcaggctggacgctctacggcggcacccagctggcagaccgctatcgcgcctttaaccttggggtggggaaaaacatgggctatttcggcgccctgtcgctggatatcactcaggccaacgccaccctggctgacgacagcgaacatcaggggcagtcggtgcgttttctctataacaaatccctggatgagaccggcaccaacctgcagctggtgggctaccgctactctacccgcggctattataactttgccgataccacttaccgccggatgagcggctacagtgtggaaacccaggacggcgttatccaggtaaaaccgaaatttaccgactactacaatctggcttacagcaagcgcggcaaggtgcagctgagcgtgactcagcagttggggcgcaccgccaccctctatctcagcggtagccaccagacctattggggcaccgacgatgccgatgagcagctgcaggccggcctcaacgccgccgtggacgatatcaactggtcgctaagctacagcctgacaaaaaacgcctggcagcaggggcgcgatcaaatgctggcgatcaatatcaatatccccttcagccactggctgcgttccgacagccgctcggtctggcggcacgccagcgccagctacagcctgtcgcacgatctcaatggccgcatgaccaatctggcgggcctgtacggcaccctgctggaagacaacaacctcagctatagcgtgcagaccggctatgccggcggcggcaacggcgacaacgggagcacaggctacaccgccctcaactaccgcggcggctacggcaacgccaacgtcggctacagccgcagcgatggctttaaacagctctactacggggtcagcggcggcgtgctggcgcacgccaacggcatcaccctgagccaaccgttaaacgataccgtggtgctggtgaaagcccccggcgccggcggcgtgaaagtggaaaaccagaccggggtacgcaccgactggcgcgggtatgccgtcctgccttatgccactgagtatcgcgaaaaccggatcgcgctggataccaacaccctggcggacaatgtcgaccttgacgatgcggtggtcagcgtggtgcccacccatggggcgattgtccgcgccaactttaacgcccaggtggggatgaagatcctgatgacgctgacccatcgcggcaaaccggtgccgtttggcgccctcgccaccggcgacagcaaccagagcggcagcatcgtcgcggacaacggccaggtctacctgagcgggatggcgctggcgggcaaagtgcgggtgaaatggggcgatggcccggacgctcagtgcgtggccgattaccgtctgccgccggagagccagcagcaggcgctcagtcagctttcggtcgcgtgccgctaaggagatcatgatgagaacactgcagtatctgctgggcgccctgttcaccctgggcgcaccggctgcgcttgccgccgatagcacgatcgccatcagcggctatgtccgcgataacgcctgcgcggtagccggcgaatcgaaggattttactgtcgatttacaggataacgccgcgaagcagttttatgccgttggggcgacgacgccgccggtgccgttccgcatcgtgctgtcgccctgcggcacttccgtcaccgcggtgaaggtcggtttcaccggcgtggcggacagcgtcaacaccagcctgttaaaactcgatgccggggcctcggcggcggcaggaatgggggtggaaattctcgatcagcagcagtcccggctgccggtcaatgcgccgtcatccaccatgacctggaccacgctgaccccgggccagaccaatattctcaacttttacgcccggctgatggccactcaggtgcccgtcaccgccgggcatgtcaatgcgacagcgatattcaccctggaatttcagtaagcggaggctgaaatgaaatggactcatgtgggctggctgctggccggcctgttaaccgcgagcgcttccctgcgggcggccgacgtcactctcaccgtcaacggcaaggtggtggccagaccctgcacggtttccaccgtcaatgccaccgtcgagctgggcgatctctatacctttagcctgatcggtgcgggctcggcatcggcctggcacagcgtggcgctggatctgagcaactgccccgtgggtacttcacgggtgaaagccaccttcagcggaacggcggacagcaccggctattacaaaaaccagggaacggcgggcaatattcagctcgaactgcagaacgaggacggcaccacgctgaacaatggcagcagccagtcggtacaggtggatgaggccagccagtccgctcgcttcccgctgcaggtcagggcgctgtccgtcaacggcggcgccacgcaaggcaccattcaggcggtgattaacgtcacctatacctacgcctgagccaggagagcatcatgatgaaaaaaataatccccctgttcaccaccctgctgctgggctggtcgatgaacgcctggtcctttgcctgcaaaacggccaccggggcgacgattcccatcggcggcgggtcagccaacgtctacgttaacctgaccccggcggtgaacgtcgggcaaaacctggtggtcgacctctccacgcagattttttgccataacgactatccggaaacgatcaccgactacgtgaccctgcagcgcggatccgcctatggcggtgtgctgtcgagtttttcaggcaccgtgaaatataacggcacctcttacccgttcccgaccaccacggaaaccgcgcgggtgatttatgattcacggaccgataaaccctggccggccgtcctgtatctgacgccggtgagcactgccggtggggtggccatcaccgcaggatcgttaatcgcggtgctgatcctgcatcagaccaacaactacaatagcgactccttccagttcatctggaacatctacgccaataacgacgtggtggtccccaccggcggctgcgacgtctccgcccgcgatgtcaccgtcaccctccccgactatccgggctcgatggccgtgccgctcaccgtccactgcgcgcaaagccagcagctggggtattacctctccggcaccaccgcggacagcgccaacgcgatcttcaccaataccgcctccgcctcgccggcgcaggggataggcgttcagctgacgcgcaacggcagcgccgtcccggcgaacagcacggtctcgctgggcaccgtcggcacctcgccggtcaatctcggcctgacggccacctatgcccggaccacaggccaggttaccgccggcaacgtgcagtcgattatcggcatcacctttgtctatcaatgatgaccgattatatcctctcgccctgctcgctggccgcccgcgggttgagccagctgatgctgaacgccgcgaagcggcccgttgagctgccggtcgagggcgtgtccctgcgcgagctggccgccgtgaagcggatcgtggtgtatctccctgacgatcccctgtggatgctcaccacgctgcgccaggcggcaaggctactcgacgaggccttgccgccgttaccgatgttgattctgagccgcagcccggccatctggctgtggcaaacgctgctctatcaggtgagtcatccggatcgtctgcgcaacgtccatactgcccccgccgatctgtcctgcgcggagctggcccatcggctggagaatgcgccgcggcttgagcggcttgccagcgaagccgccctgatccacggaaaacgggtcgtcgggttgacccacgccgagctcaaggtgatcctcgccctgctgcaagggcagacgataggcgagcaggcccaacgtctcggattgagccagaaaacgctctacacccagcggctggctggggtgaaaaagctggtggaatgtcatccgcatctggccccccgctttccgcgcacgctgctgccgcgctcacccgcaaacgcactgacggcgtttgaacaggaatgggtacaagcgatccacgatcgccaggtcttcccggtttttcaacctatcgtcgatagtcgctcacagctacagggggtggagatcctgatccgctggcgccaccgcggccaggtacttcacccccagacctttctgccgcacttccgcgccgactacacctggctgctgcttacggcctttgttctgcaggaggccgtgcagaatattaatgagtatccaggcaccttctatttttcggtcaacataccctcctcactcgccgacagtgacagcctgctgcggatggtggaagccgctcgccagcagcttcggcagccagagggcgtggcaaggctggtgctggaatatgctgaaactatcgattttcgccatcagagccgctccgccgcccacgtggcgcagttgcaacgtgctggcgtgcgcgtgatgctggacgactgcttttctcaggggagcgttatctttccggcgcgtcgactgcacttcaatgcgtataaactggatatgagcatcgtcaacgacgcccagcacgatccaaaggcgcttgcgctaataaaaagcctggcctactactgccagttaagcgacagtcgctgtgtggcggaaggggtggattcactggcgaaatttacgcagttaaaatcgctggggattgatcgcttccagggctatctgttttcaccaccgatgcggcgtgaacatctcccggatctgatccgccgcttttcccaccagcgcgatccggcggatcgttgagggtgcgagaaaagcgcaccggttagcaccggtgccggtacgtcatgcgcgaatatcgtcgtattcgcgggtgttatcgaattcatgtttggcaaacgggcagagagggataatcttccgctgctcctggcgcattttttccactaccttcgccaccagctgtttccccacgccctggcctttcaggctgggatcaacatcggtatgttcgataatgctgaggtgttcgccggtgggaacaaaaacaatctccgccacctggtttccctgcgcgtcgttaacataaaatttgttatgcccttccagtatttccatcttctcctcgcttatttatgacgatattgcagagcgccgctcgggcaggtatcaatcacgtttaccaccgtcgcgacatccacttcatccgggataatccacggcttacgcttcaggttgaagagcttcgcgctgccgcgcacgcagttcccggaatgctgacagatcgccgtattaaagtagacgtcgattttctccccggtgtaggcccggtagccggcttccagtaattccttatccatgacattgcctcggtcgtttttatctttcaggctaagcatagccctcgccgtggcggctgactatgcgcaagcgcgggaattgacgcctcacatcatgctctcccatcgcgcaaggatcccgcagtcaacgatcggttgactttcattcccgcaacgaggcgattacactcatgacacactggtatgatcactcagggatgttccattgaatcatattgccaccatcgcccgcccggcgcggttactgctcgtcttgccgctttccggctgctcactttcgccagagatcccggtattgggcgctgcttttcccggctggtttttctgcttactgggcggtgcgtttttactgatcccctgccatatcctgattacccgtaaaggctggcagccgcgcttttctcccctggtcttcagctacgtcgcgctgatgttcctgttcgccacgttgctgtggtttctgttttttgttcactgatcgcttatgacaacttcccgcacttctctgttacgcaaaaagtggcctctgctggcgctggtccttgccgccatcctggcgctgatcctcgttatctggcagttgcaaacctcgccggagaccaatgacgcctatgtctatgccgataccatcgatgtagtgcccgaggtcagcggacgcatcgtggagatgcccattcgcgataaccagcgggtgaaaaaaggcgatctgttgttccgcatcgacccccgcccctatcaggcaatgctcgatgacgcgaaagcccggctgacgaccctcgacgcgcagatcatgctgacccagcgcaccatcaaagcgcaggagtataacgcccagtcggtggcggccgccgtcgagcgcgccagagcgctggttaagcagaccacctccacgcgtatccgccttgagccgctggtgccgcaggggttcgcttcccaggaagatctcgatcaggcgcgcaccgctgagaaagcggcgcgggcggagctggaggccacgctgctgcaggccaaacaggcctcggcggccgtgaccggcgtggatgccatggtggcgcaacgcgccggggtcctggcgcaaatcgccctcgctgaactgcatctggaatttaccgaagtgcgcgcgccgttcaacggcgtggtggtggcgctgaaaaccaccgtcggccagtacgcctcggcgctgaagccggtcttcaccctgctggatgacgaccgctggtatgtgatcgcgaacttccgcgaaaccgacctgaacaacgtgcgccccggcgtggcggcgcggatcaccgtgatgaccaaccacaaccggacctttaacggggtggtggattcggtcggctccggggtcctgcccgaaggtgggagcgtcatcgaagggctgccgctgatccagaaaagcattaactgggtccacgtctcgcagcgcttcccggtgaaaatcgccgtcagcgatcccgacccggaactgttccgcatgggcgcctcggccagcgccgtgctgcagccgtagccgggcgacgctatgtttcctctcgcccattttttacgccaggaactgcgcgacgcgccgggacgcgccagctacacgctgcgcctgacgctaagctgcgcggtgctcatcaccctgtttatgaccctgcagatccctttcctggccgttgcgctgatcgtcgtgttctacgtcagccagcctaacgtgttgatgattaagctggtcagcgtggtcttttttgtcaccgtcaccgtggcgctcggcggcgtgctgctgatcatcaagtggacctatgactacccgctgatccgcctggcggcctccgtggcgctctttttctgcgccctctatctgatgcgggtgctgggcaagctgggactggcctttttcgtggtggcgctggcggtgatttacgctcagaccttcccgtcgatgaccagccagagcgagatcctggtgcggctgctgctttggctgtgggtggcgattaacaccgcgatcctcgtcaccctgctggtcaacgcctgctttcagcaggcctttcccggtaaccagtttaaggcgcgcctggccgggatgctgcacgaggtcgcccggcggctggcggccccggacgctgaagcgccaccgaccttcggcgagaccgccgcgcagttcaatcagctgcagtcgctgttcgcccaggccagccgggcgacaccggagatcgccgccgatcccctggcctggcgctcgcggctggccgccactttgcgctgctaccagctggcggccctgctgcaagcagacgaggcggatagtgacgatcgccagcagctgtcgcaggcggtacttcagctgaagaacgcccttagcgaggagccgtttgacggcgctattcctcccctgacgctcagcggtcgcggcgtcaatcgcgctgttctgcaggagatggctaccactctgcagcggctggcgcagggtgagccggttgccctgccgcagggtgaggtggagaaggcgcccctgctggcgccggacgcctggcgcaacccggcatatctccattttgcgctcaagaccctgctggcgaccctaatctgctatgtcttctataccgctgccgactggcagggtctacataccattatgctgagctgcgtgatcgtcgcccagcccgggctgggcgccacgatgcaaaagacatggctgcgcatcggcggggcgctgctcgcctccctgctggcgctgctgttaatcgtctttgtccagccctggaccgattcgctgacgggcctgctggcgatgtccctgccggtgctggcgctggcggcgtggattgccgccggctcggagcgtatcgcctacgccgggatccagattggtttcacctttgcgctggcctttctcagctggtttgctccgctgacgaacctcaccgagctgcgggatcgggtgctgggcatcctgctcggggtgctggtctcctccattgttcatttgtatctctggccggacagcgaagcgccgcagctgaaaacccgccttgcggcactttatcgccggctggcggactgcctcgccgccccgaaggaggcggttccgctggctcccctgcttgtcgccttcaccgacagcgaagcgctgatccaccgggttcgcgccgaaccgctgggcacgtatgctcacccctggccccaggcgaaaggctggccgatgcgcgccaccctcgcccaggccgaggagatcgcccgcctcagcgaaggctaccgactcaacgccgcgccgggagacccgaccctggcccgctgcgccgaacagctgcggcgctacgctgaacgcatcgaacaggaggcgacggcgcctggcgaacagctgaccgccgacctgactaacccctttggcccggcgctggccgccgcgctggccgccctgcccgactgggggccgacaccgatagcgactgagcaacaggctaaaacgtcatgatgatccttcctttctccgcgcgcctgcgcggcactctttttaccctgacgctgacgctgctcagcggctgcgcgctgatccaggatgagcctgcccaggtcgccatcgtcaatccgcagcaggcccagctggcgcaggtgatccacctggcgaacagcgactggccggccgcccgctggtgggaggcctatgatgatcctcagctcaatatgctgatcaaccgggcgctgcagaactcgccgaccatgcaggccgcccggctgcgcatctcccagtcgcagtccacggtggaactcgcccggtcggcaatgggcctgcaggccaccgccgtcgcggcgcaaaaccgcctgcggatcaccgacaaatcctttagctggccctactcatactccctgccggtggataaaaacggcccctggtatacgctgaataccgttggcgtcggggcgcagctgaatatcgatctctggggggccgatcgcgcccgggtcgccgccgctattggcgagaaaaacgcccggctggcggagaccgccggcattgagctcgacatcgccagcagcgtggcgcagctctatttcgccatgcaggcgacgttccagaaaatcgcgctgctgcaggagctggagggcattgcccgattctcggtggaagcccacgagcaccggacccggcgcggcctggaagacagtgtggatgtggccaacgcccaggccgaacagctcgccgctcgccagcagatcattagcgccgaggggatgctgacccagtatcgtgaaaccctgcgggcgctgatcggcgccgatgcgcagagcatgccggccatccatccggtggcgctgccggcgctccaggagacgctgccgccgtcgctttctttcgagctgctggcccgccgtccggacctgcaggcgctgcgcggctacgtcaccgcctccctgagccaggtcgatgcggcgaaagcggccttctatccccattttgatatcaaagcgttctggggctataacgccctgagcgtcggggatctgtttaagtcctctttccagcagatcaacctgctgcccgggctgtatctgccgatcttcgacggcggccgtctgaacgctaatctgcagtcggtacgcaccgccagcaacatcctgatcaaacagtacaaccaggcggtgctggatgcggttcgcgatgtcgctatcagctccagccagcttaacgacctgaatcagcagcgcgcgctgcagcagctaaaagtcaccgcggcgcagaccaccaccgatagcgctcgcgcccattatcagcgcggcctcctcagccgctacgccgccgaagaagcccgccgggcggtcctcgcccagcagctgttgctgctggacattgaggcccagcggctaagcaccgacattaccctgatcaaagccctgggcggcggctatcgagggcagtaacaagaatgccttcccaataggggaaggcaatcagactgcagacaaagtgcaatcttcagcgattgcacggcggcgctgcgcttgcgcgggcctacagctaactgcataactgtctgatattgcagttttttgtaggccgggtaaggcgaaagccgccacccggcagaaaggcgagcacaatagcgaaacgggtttgtcattcgccagaatgccttcccaataggggaaggcattaagctgaaggggcggggtagatgcgcggcgattacaccagggcgcgcagctcttcccgcatataggtggaaaagaattccggatgcttaatcaccagccgttcgccggcggcgacccgttcagcccactccgccactttgtcggtaaacccagcgctccagccctgctgttggccgcgcgcagcgacgtcggccggggtggcgggtacgcccagttcttttaaatatttgagaattcccttcgcggtactttcatccatagactgtggtactggctcagacgtattcataccaccgatgaaatccaatgctttatcaatgactgctggcataggtgtgtccttatattaaccacatagtaaacctgactacactatggaccggaaagcgacgtgatttcaaagaacacgctcacgttatgggacatcgcgcattgagaaaaggggattttgttctgctggggcggggattggacaaaaaacaagccggccccaccgggccggcctgaggcttgcgtcaggcgttgctgagggatttttgcgcggcgctggaccgactgttctccagcatccggcggaccgggacaatcagcacggccagcacggcggcgcagatcagcaatgcgatggagcagcgggcgaagaggtccggcagcagcgacagttgatcggccttcacatgaccgccgatcaggcccgccgccaggttacccagcgcgctggcgcaaaaccacagccccatcatctggccgcgcattctctccggcgccagcagagtcatggtagccagcccaatcgggctgaggcacagttcaccgagcgtcagcatcaggatgctgcccaccagccacagcggcgacacaccggccccgccgttgctcagaacgttctgcgccgccagcatcatcaggccaaagccgccgctgcgcacaggatgccaatcacgaatttggtcatactgcccggacgaacgtttttacgcgccagcgcaggccacgcccagctgaataccggcgcgaggagaatgataaacaaggcgttaatcgactggaaccagaccgcggggatctcaaaatcgccgatcatccggttggtatagtcgttagcaaacaggttgaaggaggtcggtttctgttcaaaagcggaccagaaaaaggccgccgagaccagcaaaataaagcataccagcaggcgcgcccgctctttacggttgagtccggcgaagacgaacagccagatgaaatagagcgccacggaggcggcaatcacatagaccagcacgctggccaccgctaccgggttaatcacgatcgtgcccaggctgataagcgtgaccagcaccgccactcccagcgccagcgccagcagccacgctccaacgccattctttttcgccaccgggctgttccaggtggaatcgaggccaacctccgcgtcatagcgcttcatcgacggtacggcaaagacacggaaaatgatcagcgccaccagcatcccgatccctccgatgccgaagccccagtgccagccatgcgatttgataagccagccagagatcaatggcgcgataaacgagccgatgttgatccccatgtagaacagcgaaaaaccaccgtcgcggcgcgcgtcgccctttttatacagggtgccgaccatcaccgagatacaggttttaaacaacccggaacccaggacgataaacatcagaccgataaagaacagatcgttgcccagccatgctgacagagcgatcgacaggtgccccagggcgatcaggatagagccgtaccagacggcgcgttgttggccaagccagttatccgccagccagccgccaggcagcgcggccagatacatactgccggcaaaaatcccaacgatcgccgaggcgttctctcgcgccaggcccatgccgccgtcgtacactgtcgccgccataaacaggatcagtaaaggacggatgccgtaaaacgagaagcgctcccacatttcagtgaagaacagggagcccagcggataaggatggccgaaaaaggtacggctttcgtttttattaacagaggaatgcataaattctccaggtaaggtgcgccgcagcgcaagttaaccgtataaagcaggctgacgatttataatttgtttgcattaacatcaaacacgagcatttttaaccatttgataaccacgcaatggttttgtccagccccttaccttccctttttagatgaaaagtcgacaaacatctagttttacagatttaatgttcgcaataatgcaaacgacgttgactttatatcattacgcacaaaacgaaattttacccattaaaaacaaacagttaataatttatcgagagacataaaccaccggcgcagaggcggtgtataacggcaggaaaagtaagggaaacagactggatagtggagaaatagcgctaagcgagaatattgtcagcaatccaggcgctacatacctggagagcctaccatacagcagggttaacacggcatgccggctgctacagccggcgccattctgcgcgctatttcacacgctgccctgcggcatcaatgactggctcaccgtcctccttcacgaatgcgcctttttgcggcgccgtcaggatctccagcaccacctctgacgggcggcagagtcgggtgccctgcggcgtcgttacgatcggacggttaatcaggatcggatgctgaagcataaagtcgattatctggtcgtcagtaaaccggtcttccgccaggcccagcgcgtcgtagggttcgacgtttttccgcagcagcgcgcgcaccgggatccccatcgcggcgagcagctggcgcagctcatcacccgacggcggcgtctccagataatagataacggtgggctcggcgccgctgttacggatcagcgccagcgtattacgcgaggtgccgcagtcagggttatggtaaatggtgatgctcatagtacgttctcatggctggttgaaggagagacgcagcgccagcgcggccagcgtcacaagcagcaccggcagggtcatggtgatgccgcagcggaaataatacccccaaccgatggtgatgtgcttctgcgccagcacatgcagccacagcagcgtggccaggctaccaattggcgtgatcttgggccccagatcgcagccgatgacgttggcataaatcatggcctctttgatcgtccctgttgccgcgctgccatcaatcgacagggcgccgaccagtacgctgggcatattattcattattgaagagaggaaggccgacaggataccggtgcccagcgtcgcggcccagagcccgcgctccgccagcatgttcagcaccgtggtcagataatccgttaacccggcgtttcgcagaccatacaccaccagatacattcccagcgagaagatcactatctgccacggggcgccgcgcagcaccttgccggtgttaattacccgcccgcgcttcgcgacaacaaacaggatcccggcaccgagcgccgcgatggcgctgaccgggatccccagcggttcaaggacgaaaaagccagccagcaacagcagcagcacgccccagccggtgcggaacgtcgctggatcttttatcgccgtggccggcgcttttagtaacgccatatcccaggccggcgggatatccttgcgaaagaacaggtgcagcatcgccagggtggtgaggatcgccgcgagatcgaccggcaccatcaccgaagcgtactccctgaagccgatggcaaagaaatctgccgaaacgatattcaccagattcgacaccaccagcggcaggctggcggtatcggcaataaatccggcggccatgacaaaggccagcatcgttctcttgctgaaccccagcgctcgcagcatggcaatcacgattggcgtgaggatcagcgccgccccatcgttggcaaacagcgccgccaccgccgcgccgagcaggataatccaggtaaacagcagacgaccccggcctcttccccagcgggaaacgtgcagcgcggcccattcgaaaaagccagactcatcaagcagcaggctgataatgataacggcgataaaggtggcggtcgcattccagacgatatgccataccaccgggatatcggctacctgtacgccaccggtggccagcgccagcgccgcgccaaatgccgcgctccagccgatccctaacccccgcggctgccagatcaccagcaccagggtcaggataaaaatcgtacctgccagcaacatcgttcctccgcaaatcacattcgaaaaatcatatatgttaagataaattttttaccggcaacccggcccgccagccagtctgctgatcatcagccgcacatcctcctgctgactgagccaggcctgctcaatcacctgcgccgcccaggccggcatctgcggagagaggcggtaatggacccacttaccctgtttacgatccagcagcaatccgctctcacggagcatcgccagatggcgggagatcttgggctgggactgggcgagcgccgtacagagatcgcacacgcacagctctccacgcgccttgagcagcaatacgatccccagccgagtttcatcggcgaggtttttgaacagttgcaggggcaataaagacatgatttctcctcaagcgtgacggacagcatacggggccacaaagaaagatcaatatacatgcgcaaaaacatatatattaattcacgtctgcgatgagcatccgggatgttgcgccccgccatccctgctaaatagcacggaaaaatgccgcgttttcttttatccatcatcgaaatatgtcaggctggagatcccattggattgccagggctttcaggatgagtacgatttatgtggttgttttaacgtatataaaaccgctcgaagcggttgaccgtgcgatccccgcccacatcgaatggctcaaaaaaggctatgccgacggcctctttctcgcctccggccgccgtattccccgcaccggcggcgtcattctggcaaaatgcgatagccgggaaactctgcaagcgcgtctgagccaggatcccttccagcagctgggtctcgcccgtacagagattattccctttgaggccagcatggcgtcacccgcgctgcagtcgctgttataaccctgtctgaaagcatatcccggaggaaaaatgcagccgtactttcactggatcaatgaacctgccgagtggcgccgcgattccgacggcctgacggtggtcactaataagcataccgacttctggcgccatacctggtatggcttcgagcgcttctctggccatctctatgccgcagaagtggcgggcgattttaccctgcaggcaaaaatctgtgcggatttcaccacgctttacgaccaggctgggctgatgatgatggccgacgagcagacctggctgaaggcgggaattgagtttaatgacgatgccccggccatcggcagcgtactgacgctaacccactccgactgggccaccgggcttttccccggcgacccgcgcaccttctggctgcggctgacccgcaagggcgacgcgttaagactgcagtattcaaccgacggcgagcgctggccgctgctgcggctcggctactttccgccaggcccggtgaaagcgggcgtcatgtgctgctcaccggagcgtggcggactggcggttgcgtttcaggatattcagctttccccgccgctggacaaagcgctgcacgatctgagctgaacgctagcgggaagacccgattttctctgcatcatccgcggcatacattatcaggaaatcaatcagggctttcacccttttcgttctgcctgcgttttttgggtaatagagataaaccggcggataggttttccagtagtcctccatcacgggaataaactgctcacgatcgggctgtaattgcaggattggttcaaataaacggccaatccccagtccgtggcgaataccgtcggccatgacgtcaatatcattgctgattaactgtccgggcatctcgacggtgagctgctcgccgtggtcattgaggatcagcggcaggatgcggttgttggtaataaagcgatagccaatcagccggtgatgatggagatcggcaggcatcgcgggcacgccatattcggcaagataggcagaggaggcgtatagcccttcacgaaacggcttcattaacgggcgggcgaccacgccgccttcgagaatatcgccaaagcggatcccaaggtcgaaacgttcttcaataatattgacggtaccgtcatagaccgatatttccagctggatccccggatattgctgacaaaatgccgccatcgccggtttgagaataagcaggtaggcaaagcgcgagagggttattctcactgccccggagggctcctgattctggtcgcggatgatttccagcgacttttccagtgtctccaccgccgcggcggtctgctccagcagctgttgcccggtttccgtcagctcgatacgccgggtagtgcgcacaaaaagggggtggccaatatgctcctccagcagcctgagcgcattgctgaccgacggcggcgtgatttcgagcttgcgcgcggcggccgagatattgccctcgcgcgcaatgctctgaaagatgcgtatctgattataaagcgcgttattcatagcatctccttaagacaccctcgcctgattattaagtacaggctaaatattcttaagtcaatgaccgcctaatcttccccccctgcggctcgtatacttttgtctcttcccgctgacaacgactttccggagacaactatgcgaattttatgtctggatatccctgcccccggcgcgacgctggaacactatgcgccgcaccttaccgcagaagccctgcacgcctggggactgtacaagtcaggctttattcgcgacatctatttccgtcaggatcgacccggcgtcgctattttcctcgagtgcgacaccgtggaagaggcgaataatgtcatggccgaatttccgctggcaaaagcgggtctattaaccttcgagtgtattccactcggctcgtttattagctgggaaaatctcttctctgctgaatttaaacatcaggagtaacgttgggaatggctcatattcttgtcgtttccgggcatccggatcttaaccattccatcgccaacgccaccatcctcgatgagctggcgaccgccctgcctgatgcggaaatccgtcgtctggactggctctatccggacggcaaattcaacatcgccgctgagcaggaaagcctgctgcaggcggatgtgattgtctggcagtttccctttagctggtatgggctgcccgggttaatgaaacagtggctggacgaggtatttgtccacggcttcgcccatggctcaacggcgaaactgggtggtaaaaagctgatcctctccttcaccacgggagcgccacaggcgctctataccgctgacggtttctttggccatgccattgaggagtatctccttcccttcgagaccacggccaggctttgcaatcttgagctgctggcgccggtttatacctgcggtattagctacgccgaccgggatgccgacaaaatcgctcagcaaaaaacgcttgcccgggaacacgcggccagactgatcgcgcggcttaatactctggtggaataacccaaagggagaaaataacgatgcagtatacccggctcgggaagagtgacttactggtctcccgtatctgcatgggatgtatggggtttggcaatccgtcaacgggtcagcatcgctggacgctggacgaaacagccagccgggacatcatccgccacgctctggaacagggcatcaatttttacgataccgccatcgcctatcagaacggctccagcgaacggtacgttggccgggcgctgcgggagatggcaaaacgcgaggaggtggtgctggccaccaagtttctgccacgaaccgccgcgcagattgccgaggggatcagcggaaaacaggctataacccgctcgcttgaccagagtctgcgaaacctcgggatggactacatcgacctctacatctaccacatctgggattacaacaccccggttatcgacgtgctggaggcgctgcacaccgcagtgaccgccggcaaggtgcgcgcgattggcatttccaattgctatgcctggcagctggcgaaggcgaacgcccttgcccaacgcgaagggctgacatcctttgtttctgtgcagagccactacaacctgattatgcgtgaagatgaacgagagctgttcgggctgtgcgcggaagagggtatcgccatgactccctatagcgcgctggccagcggccgtctctcccgcttagaaggccacacgcggcgagcggtggaagatgattatgcccggggcaaatacgacggcacggcagagcaggaccggatcattattgcccgcgtcgccgaacttgccgaacggcatcaggtctccatgaccgaaatttcgctggcctggctgctgactaaagtcaccgccccggtgatcggcgccacgcaaaagcatcatgttgacggcgcggtcaacgctgtagcccttcaactgagcccggaagacatccgttatctggaagaagcctaccagccgcacgttctcacaggcgtgatggcgcaaaacacgccgcaagccaaagaccatcatcaggtgtggacgcggtaaccctctgtcctgttcagcagggagaataaaacatgaaaaacgtgattgccgcggcagccttgtcgcttgtgctgtctgattttacttatgcccacgaacaaagagatgaagctatgatgaaaattaccccttccacccttgcggacgctgatattcaagcggtctccccggcgctggcgcgcttcggccgcgaggccatcagcaacgacctctggcaacgtgacgccctgtccgcccgcgaccgtagcatcgtgaccgtagcgatgctgattgcccgcaaccagccaggcgagctgaagcactatattgccgttgcgctcgatagcggcgtgacgccagcggaagtgtcagagatcattactcacctcgccttctacgctggctggcccaatgcgatgtcagccgtcagcgtcgctaaaaccatctttgaagccaggggcgtgacggcagaggccctgcccgccgcctcgccaacgctgctgccactcaatgaacaggtagagaaacagcgtgcagacaccgtggaaaaaaatgtcggccccatttcgcctggcctggttaaatttaccgccgacccgctgtttctcgacctctggcaacggcccgcgcttacgccccgcgacagaagtctggtgacggtcagcgcgttaatcgccgccggacagagcgcgcagattggctaccacctaaacagagctatggataatgggctttcggctgaagaggccggagaagtggtcgcccaggcggcgttctacgcgggatggccaaatgcgtttaccgccgccccggtggtcggtgaggtattgcgagcgcgcgagagcaaagctgaataaaaaagaataaaggacagggaagctgtcctttatttatcgttaattgttaatttaaaggtaccacgagggctttcgattaggtctcgcggaaagaacataaacggtctatcgaagtatggagacttcgatcgtgagtctgttcacatcgctcattgagaaaattgccgttccgtatgccgtcatgagtctcatcctttgaaagcagcgatcgctgtggcgagacgatagcgcggacatgtctatttggtccagagatggacatctcaatttagctactacaccgctacttcgattgatgtattttatatcaaatatcaatgaattgaattattcatttaatataaattgatgttatagcaatcgctatacaggctccttagtcatgactgacctccccacaccgcatatcgcaagaatttgctctctcagccagcggtgaccggggtcgcgttccattcttgggtgccacatctgcgataccgtaatacgacggcttttgaacggcagctcgaaaaggtgtacctggtccgttacctgctgattgagtaaatagagtgcgggtatcatggcgataagatccgattccagcgccacggaaagtgctgtcggaaatcccggtacgacgcttgcaattttacgttttgtccccagttcggccagcgcatcgtcaacggatccgtgcaacgcgccctcgggtgacgctaccacatggccccaggcgacataatcactcacgcctatttcagcctgcttagccagcgggtgccctttacggacgacgccaacaaaccgatcctcaaacagtcgttgcagccgtatttctggccccatattactctgaacgccaatctccagatcaaccagcccttcccgaagatagcgcgacgttttttccggcttaggcgcgaagcgtatacagacgtccggcgctgcgtcggcaaccgctgctataagcgcaggcccaaacgccaccacaaaaccatcgtttgccctgatggtaaaaagacgcgccagattttgcgcgctgaacgtttcagttgagggctgtaataccgccctggcatcgtgcactgcacgcctggcgcgatcccgggtcgcttcggcccacggggtcagtaccatgttacgcccggcgcgtaccaggatcgggtctcctgtgacatcgcgtaacctgcttaatgtccggctcatggccgaagtgctgaggttcagacgacgagccgcacctgcgacactcgcttcactcagcaatacgtcgagagctaccagcaaattaaaatcgggatcagacattacccttcctcccagcacattaagataaggcgtttgatgcaacaataaagtgaaaatagtgcgccttccgcctggtaaaagccatctttatagttttgtcatccatacactcttctcagaggacaaatgatgacgctcttttccagtcaacccggcgacgaaggactgcctggcccggcgcgcgcacgggtgatggccgcaataatgaccaccaccttaatgggcgtgtttgatggcaccatgatcaacattgccctgccctccatggctcaggagatgcaggtacctgccagtattgccgtctggttcgccaacgggtatctgctggcggctgcgatgacgctggcgatattcgcggcgcttgcggcccgtctgggttatcgccccgtatttctggcgggcctgacgacctttaccctgacatcactgggttgtgcgctggcgaataagcccgaagtgcttatcggtatgcgcgtgcttcaggggatcggcggcgcggcgacgctgagtattgcccccgcaatactcaggtccgtatttcccggacgcttacttggccgcattctggggttccatgccctgctcattgcctcgagctccgctatcggcccggtattgggcggtactatccttcacacccttagctggcaatggctgtttgcgataaacgttcttcccggcaccctcgccttactgctggcggtcagagcgctgccgcgggatgcgatccgtatgcaggcgcccttcgacaccgtgggcgccatattgtcggcgctgctgttgggttcgacgatcatggcggcgaacagcctacagaacgctacttctcaattcggcagcctttgctggatggctctcgctgcgctgagcggcatggcttttatctggcaaatccgccgcacgggttctcccttactgccgccgagcatgtttaaaaatgaacgttttaccctcgcggccttcacgtcgatggttgctttcgtcagccaggggatcacctttattgcgctacccttcctgtttcagagcgaatacggctacagtccggtagtgtctgccctgctgtttacgccgtggccattagggatcgtgctgattgcgccgcatgcaggccgttgggcggacacgatatcagccccggcgatatccaccctggggctggtgatatttgtcgtcggtttgatcctgctggcgacgttacccgccagaccttcaatgtgggatatctgcctgcgaagtctggtatgcggaatagggtttggctgctttcagagtcccaataaccgggaaatgctctcaaacgttattcgtgagcacgcgagttatgcgtccggtgttttatccattatgcgcactttcgggcagtgcctgggagccgccgccgtagccgttctgctggcagcagatgaaaggtcaattcatgttgcgctgtggagcgccgccgcggcctctgcggtatcggtcgtcgtcagcgcgagccggttgcgaaaaatcactcatcctgcggaaacaggataagtgcgaaaatatcactaaacgctacgactccagcgccagcagcgcaaaacgccgatcccgcaaccaaagtggagtcctccgtcggagttcaatagactaacagaatgctataaccgctgatttattaagggaaaattgagtttggtagacttcaggagacttgaatttggagcgggcgaagggaatcgaaccctcgtatagagcttgggaagctctcgttctaccattgaactacgcccgcgaagaggtgcgagaagcattatagcccttacgcaccctgtgacaagcctgccggatgctgactggcgataaaataaccttttagcacttaggtttacttccctgcggcggcaggtaacgcagcggatcgatggctgtcgcccggtagcggatctggaaatgcagccgcactgagtcggcatccgtactgcccatggtggcaatttgctggccggccttcacgctctggccattattcaccattagcttatcgttgtgggcataggcggtgatgtaatcctcgctgtgcttaatcatgatcagattgccatagccgcgcagctgattgccgacgtagaccaccttgcccgccccggcggcatacaccggctggccgcgggttccggcgatatcaatgcctttattgccgccatcggcggtggaataaggcaggaccactttgccgctggtcggccagcgccagcagcgctgtcccaccggcggccaggaggactgaggtaccgcggacgaaggcgtgaccgccgcggtgcgcgtagaggaagattttttcttcgttgtcttcgttgaactgctgccgttaagcttcagcttctgccccacctcaatggtgtaaggcggggagatgttattcaggcgggccagatcgcgaacgctggtgccggtggtgcgggagatgccgtacagggtatcgccgcgtttaacggtgtaggtgccaccggaatcggaggtgctggagcagccggccagcaccaggcttgccgccagcatcagtgtcatataaaagcgtttcatcatcaggcatcctgcacttaacacaaccacttacctcgcaatcagggcgaatatcataccagtccgcggcgcagggcgtcatccctgatggcgaaaccattatcccccgtccctagcgcgcggtctgcggcaggcagaaattcatatttgcgccacgcggcgcggcggcctctcctcgctattgcgcgttgccgttcacagagctgcctccagggcttgttttggtaatgcctttctcccatttatgggctaccctagtggcctgagtacatgacccggcgggtttgtgccgggtcattttttattttcaggagtcgtcatggccggggaacacgtcattttgctggatgagcaggatcagcctgccggtatgctggagaagtatgccgcccatacgtttgatacccctttacatctcgcgttttcctgctggctgtttaaccagcagggtcagttgctggtcactcgccgttcgttgggcaaaaaagcctggcccggggtatggaccaactcggtctgcggacacccccagcagggcgagaccttcgagcaggccgtcacgcgccgctgtcgcttcgaactcggtgtggagatctctgatatcgcgccggttcacccggccttccgctaccgggcggtcgccccaaacggtatcgttgagaacgaagtgtgcccggtatatgccgcgcgcgtggtaagcgaagtgcagcctaacgacgatgaagtcatggactatcagtgggttgacctggcaaccatgttaagcgcgctggccgccacgccgtgggcgttcagcccgtggatggtgctggaagcggaaaatcgggacgcccgccaggcgctgaccgactttgttgcgcgtctgcgcgggtaagctgactattctccaggccaggcgcagccctgtgcctgtcattaatgcctggcggcgctacgcttgcacaggcctacggttctgcgccattgcgtagcccggataaggcgtttacgccgccatccgggatccccggcttgcgctgcgctgagccaggctacgccagccttaggacctcacatcagacataaaaaaacccggcaagccgggttttttgcttttcgcgaagggcgattatttctgcggacgcatcgccgggaacagaataacgtcgcggatggtgtggctgttggtgaacagcatgaccatgcgatcgataccgatacccagaccagcggtcggtggcaggccgtgttccagcgcggtgacatagtcttcgtcatagaacattgcttcgtcgtcgcctgcggctttcgcatcaacctgatcctggaagcgctgcgcctggtcttcggcgtcgttcagctcgctaaagccgttaccgatctcacggccgccaatgaagaattcaaagcggtcggtgatttccgggttgacgtcgttacggcgcgccagcggagaaacttccgccgggtattcggtgatgaaggtcggctggatcaggtgcgcttccgccacttcttcgaagatctcggtcacgatacggcccagaccccagctcttctccactttgatgccgatagattcagcgatcgctttcgcggaatcaaagttatccagatccgccatctcggtttccggacggtatttcttgatcgcttcgcgcatggtcagtttttcaaacggcttgccaaagtcgaacacctggtcgccgtaagtcacttcggtattgccgaggatgtcctgcgccagggtgcggaacagagattcggtcagctcgatcagatctttataatccgcataagccatgtagagttccatcatggtgaactctgggttatgacgaacggagatcccttcgttacggaagttacggttgatctcgaagacgcgttcgaagccgccaaccaccagacgcttgaggtacagttccggcgcgatacgcaggtacatgtccagatccagcgcgttatgatgggtgatgaacggacgcgcggaagcgccgcccgggatcacctgcatcatcggggtttctacttccataaagccgcggccaaccatgaactgacggatgcccgccaggatctgcgaacgcactttgaaggtcttgcgggattcatcgttggagatcaggtccaggtaacgctggcgataacgcgcttcctgatcctgcaggccgtggaatttgtccggcagcgggcgcagagctttagtcaacagacgcagctcggtgcagtggatagagagctcaccggttttggtcttgaacaacttaccgcgggcggcgatgatgtcgccgaggtcccactttttgaactggtcgttataaacgccttccgccaggtcatcacgcgccacgtacagctggatgcggccgcctacgtcctgcagggtcacgaaggaggctttacccatgatacgacgggtcatcatgcggccagcaacggccacttcaacgttcagcgcttccagctcttcgttttctttgccatcgaagtcagcgtgcagttggtcagaggtatggtcacgacggaaatcgttcgggaatgcgacgccctgctcacgcagcgcagccagcttctcgcgacgggttttcagttcattattaaggtcaattgccgcgtcagcgccctgtgcttgttgttcagacatgttggttcctcataaccctgctttcaaacttgcttcgataaattggtccaggctgccgtcgagcaccgcctgagtgttgcgggtttccaccccggtacgcagatctttaatacgcgagtcatccagcacgtaagagcggatctggctgccccagccgatatcggacttgttgtcttccatcgcctgcttctcggcatttttcttctgcatctccagttcataaagctttgctttcatctgcttcatggcctggtctttgttcttgtgctgcgaacggtcgttctggcactgcgtcaccaatccggtcgggatatgggtaatacgcaccgcggattccgtacggttaacgtgctgaccaccggcgccggaggcgcggtatacgtcaatgcgcaggtcggccgggttaatttcgatatcgatatcgtcttccacttccgggtaaacgaacgcggagctgaaggaggtatgacggcggccgccggaatcgaacgggctcttacgcaccagacgatgaacgccggtttccgtacgcagccagccgtaggcgtaatcgccaatgatcttaatggtcacggatttaatccccgcgacttcaccttcggattcttcgatgatttcggtcttaaagccgcgcgcttccgcccagcgcaggtacatgcgcatcagcatgctggcccagtcctgggcttcggtgccgccggaaccggcctgaatgtcaaggtagcaatcggcgctgtcgtattcgccggagaacatgcggcggaactcaagctgcgccagcttctcttccagggtatccagctcggcgacggcttcgttaaaggtctcttcgtcgtccgcttccacggccagatccagcaggccggcaacgtcttccagcccctgggacatctgatccagggtatctacgatggcttccagggaagaacgctctttacccagcgcctgggcgcgttcgggttcgttccacacgtccggctgttccagctcggcgtttacttcttcgagacgctctttcttggcatcgtagtcaaagataccccctaagaacgtcggagcgctccgtgaggtcctgaatgcggttttttaccggatttatttcaaacatggtcggtttcttttaatggatttgtcaaaatgcggtgataagagcggaattctaccggattcgcgcccttattcctacactgttgtcaatttggccagaggtgatcgatgatcagctgcaggctacggttgccgcggaactcgttgatgtcgagcttgtaggctaactggacttcacgcacgccgttatccggccagatggaagtatcaacgttgaaggcgataccgtccagcagcggcccgccgtcaaccggttcgaccatcaccttcaggtgacgctcgcccaccagccgctgctgcagcaggcgaaaacgaccgtcaaacagcggttccgggaacatctgcccccacggcccggcgtcgcgcagcatctgcgccacttccatgctcatctccgccgccgccagcgggccatcggaaaccacctcgccctgcaacagcgcaggatccagccattcggtcaccagctcgccgaagcgctgttgaaactcttcaaaacgcgcctcctccagcgataagcccgccgccatcgcgtggccgccgaacttcaggattagcccgggataaagcgtatcaaggcgctccagcgcatcgcgcatatgcaacccctgaatggaacgaccggagcctttcagcgtgccgtcgccggtaggcgcaaaagcgataaccgggcgatggaagcgctccttaatccgcgaggcgagaatgccgactaccccttgatgccattgcggatggtacatcgccagcccgccgggcagggtatcggcgctgcgctccagctgctgacagagcgttagcgcttccgcctgcatcccctgctcaatctctttgcgcgtctgattaagcgcatcgagctcgttggccagcacccgcgcttcgccgatgttgtcgcacagcagcagcgcgacgccgaccgacatgtcgtccagccgtcccgccgcgttcaggcgcggcccgagggcgaaaccgaggtcgctggccgccagcttttgcggatcgcggttggcaatttccagcagcgccttaataccgggccgacatttgccggcgcgaatgcggcttaacccctgccaggtgaggatacggttgttagcatccagcggcacgacgtccgcgacggtgccaagcgccaccagatccagcagctcggcaaggttcggcgcggggatgccgcgagcgtcgaaccagcctttatcgcgcagaaaagtgcgcagcgccagcatcagataaaacgccacccccaccccggccagtgattttgacgggaagtcgcaatcgcgcaggttgggattaacgatagcttccgccgccggcagcgtctcgcccggcagatggtgatcggtcaccagcaccgggatccccagcgcatgggcatgatcgacgccggcatgggacgagatcccgttgtcgacggtcatgatcatctgcgcgccgcgagcatgggcctgatcgaccacttccgggcttaaaccgtagccgtcttcaaagcggttcggcaccagataggagacgttgccgtaacccagcgcgcgcagggccaacacgctgagcgcggtgctggtggcgccgtcggcgtcaaaatcaccgaccaccacgatgtgcaaccctttctggaacgcgtcatgtagcatctcgaccgctttttcaacgccggtgagctgcgtccaggggagcatgcctttgacgctgcgctccagctcctgcgcgctgcgcaccccgcggctggcatatagtcgctgcagcagcggcggcaggtcggcgggtagttcgacgccgtcaaccgcctcgcggcggcgtagttgtatctgttgtttcacgcgaatcagttaccgcttgtctgttttttgtgctcatcaaggaacgccttcagctctttcggcccctgatagcccggcagcaccatgccgttactgaggaccatcgccggcgtaccgttgacgcccatctgcacgccgagggtgtaatgtttggcgatatctacgctgcagctcgccggctgcacgcctttaccattcatggcgtcatccagcgctttgttgcgatctttcgcgcaccagatggccttcatgtcctgctccgcctggctttgcagaccctggcgcgggaaagccagatagcgcacggtgatccccagcgcgttgtagtcgctcatctgctcgtgcagtttatgacagtagccgcaggtaatatcggtgaagacggtgatgacgtgctgctccttcggcgctttgtagacaatcatctcattgctcagcgcgttcagcttacccagcagcagctggttggtgacgttgaccggctgcgcgccgctcacgtcgtacatcggcccctggatgatatgtttgccgtcgtcggtcacgtacagcacgccgctgtcggtcagcaccgtgctcatcccggaaaccggcgatggttgaatatcggtgctctgcacacccagcttcgccagcgactgtttaattgccgcgctatcggcgtgcgccgctcctgaaagggaggccgccagcagggtgaacatcaataaaccttttttcatactcagtccttttgttcagcactcacgcccgcgggtggtgctgttgatgaagttgtcgcagacgctcggtcgccacgtgggtgtatatctgcgtggtggagagatcgctgtgtcctaacagcatctgcactacgcgcagatcggcgccatgattgagcaaatgcgtggcgaacgcatggcgtaacacgtgcggggaaagcttttcgctgtcgatccccgccagtacggcatagtgtttaatccggtgccagaaggtctggcgcgtcatctgctgggcgcgctggctgggaaataagacatccgacgccacgccgttcagcagccaggggcgaccatactcgaggtaattttccacccacagtaccgcctcttcccccagcggcactagccgctctttgttgccttttcccaccacccgcagcacgccctgccgtaggctgatgtcgctcatcgtcagccccaccagctccgagacgcgcaggccggtggcatacagcacctccagcatcgctttatcgcgcaattccagcggctgctccaccagcggcgcctgcagcaggcgctcaacctgcgcctcactgagatcttttggcagccgctgcggtagcttcggcgaggccagcagcgcgctgggatcgtccgggcgaattttttcccggtacagatgctggaaaaaacggcgcacggcgctcagcaggcgcgcggtgctggtggctttgtagccgccggactgccgctcagccagcagcgcctgcagatcgtcgctgccaacgcttgccagcgacaggccgcgatggtgcagccactcaactaacatcgtcaaatcgcgacggtaggcgctgagcgtattctccgccaggttgcgctccagccaaagggcatcgagaaactgttcgattagtgccagatcctgtttcacatcggcctctttgttcgttaaacgctctcattatgccttaagaggacgcctttctggtacactgcccgccattcacggcaagaatcgagatgtttacgcgatgaatataggtctgttttacggctccagtacctgctacaccgaaatggccgcggagaaaatccgcgatatcatcggccccgaactggtgacgctgcacaatctgaaagatgactcccccgcgctgatgagccagtacgacgtactgatccttggcatcccgacctgggatttcggcgaaattcaggaagactgggaagcggtctgggatcagctggacaccctgaacctcgagggaaagatcgtcgcgctgtacggcatgggcgatcagctgggctacggcgaatggttccttgacgcgctcggcatgctgcatgacaagctggcgaccaagggcgtgaagtttgtcggctactggccaaccgaaggctatgagttcaccagcccgaaaccggtgatcgccgatggccaactgttcgttggcctggcgctggatgaaaccaaccagtacgacctgagcgacgagcgcatccagagctggtgcgagcagatcctcggcgaaatggccgaacacttttcctgacgcggcttactcctgcgccggtttttgcagcaccagccggcgcagatcgcgccactctccggcgtccatgctgtccgccgccagccaaagatgctgtccgcgccgggtatcgacatggcgcaaacgcagcagcataccgctattgataacccacggcgtcccgaggatttcccattcggcgttttgccagcgaagacgggaatcggtgagcagttttatctccccgcgacgggcatggatccgccgctggctgcgcacgcagtcgaagaccaccagcgacagcagcagcagccagatcggggtatagctcagcggccagggaaccaacagcaccagggccgccaccacgccgtgaagcagcagggaaaaccactgcgcgcgccaggagatacggagatcagattgccacaggaccacgttcccgattccgtgtctgaattaaggttaccatccgctgcagctccgcatcggccggtttgccgtggttcatcagccagttgaacagatccggatcgtcattttccagcaggcgaatgaacagctgtttgtcagcgtcgctgagggtatcgtactcatactcaaagaacggcatgatggagatgtcgagttcgcgcatcccgcggcggcatgcccagtggatacgtgctttattgttaatgtccatgttgaccttccagcagcaaaatataggttagtttaacccgttttctgccgtaactttacaggaatatcgctgaatgcgagcatccttccataaaaaccttaaaataatgatgggtttattgattccctgcgtcaggcggctgtctcacgccagcgcacaaatggcctgttgaaagcacttgcaatgcactatagctcttttaccattggtcacacacactgcgttaagcgattcaggatatgactatggcttttacaccttttcctccgcgtcagccttcctcttccgctcgtctgccgttaacgctgatgaccctggatgactgggcgctggcgacaattagcgggccggacagcgaaaaatatctgcaggggcagattaccgccgatgtgagtcatctcaccgatgcccagcatctgcttgccgcccactgtgatgccaaaggcaagatgtggagcaacctgcgcgtattccgtcgcgagggcggcttcgcgtggattgagcgccgcagcctgcgcgacgcgcagctgaccgagctgaaaaaatatgccgtcttctccaaagtcaccattgccgccaacgacgatctggttctgctgggagtagccggcttccaggcgcgcgccgcgctggcgccgctgttcgccgccttgcccgacgctgccaccccggtggtcagcgaaggcgccaccagcctgctgtggtttgaacacccgggcgagcgcttcctgctggtgaccgatgtcgacaccgccaaccgcgtcaccgacgcgttgcgcggcgaagcgcagtttaacaacagccaacagtggctggcgctgaatattgaagccggcctgccggttatcgacagcgccaacagcgggcagttcattccgcaggccaccaacctgcaggcgctgggcggcatcagcttcaaaaaaggctgctacaccggccaggaaatggtcgcgagggcgaaattccgcggcgccaataagcgcgcgctgtggacgctgtcagggaccgccagccgggtgccggaagccggggaagacctggagctgaagatgggcgacaactggcgccgcaccggtacggtgctggcagccgtacagctggatgacggaagcctgatggtccaggtagtgatgaataacgacatggaaccggacagcgtgttccgcgtgcgcgacgatgccggcagcctgagcatcaaaccattgccgtattctctggaagaagattaaggaaaagttcccggcttgcggcgcttgcgccttagccgggctacccggccgcagaatatcgtagccacggtaagcgcagcgccaccgtgggatgtttatcaggactggccgatgtaaagataaatcgccaggaagtgacacacgctgccgccgagcacgaagccgtgccagatagcgtggttataaggaatacgtttgcagacgtagaagatgacccccagcgagtacaccaccccgccaaccgccagcagcgttaccccgcccaccgccagcttcactgccagctgatagaccacgataagcgacagccaccccatggtcagataggtcaccagcgacaaaattttaaagcggtgcgcgatggtcagcttaaacaggatccccagcagcgccaggctccagatgacgatcatcagccccttcgccagcggtgaattcaaccccaccagcaaaaacggcgtgtaggtcccggcaatcagcaaatagatggcgcagtggtcgaatttcttcagccactgtttcgcccgctgatgcgggattgcgtgatagagcgtggaagcgaggaacagcataatcatgctgccgccgtacaggctgtagctggcgatcgccgtcgcgctggcgtttgtatccgccgcctgcaccagcagcaacacaaggccgacgataccgaacaccagcccgatcccgtggctgatgctgttggcaacttcctctgccagagaatatccctgagtgattaatggtttgcgaaccatactggactccgtgaaaacaagaacgctttcattgcccacttagggtaactgagaatgattccagtgaacacctgttagctaaaataaaacgatgtatatttgtaaatacattaaaatcaaaaagttacatttttatttcaactcacagctgttcctgattatcttaaagcgttttgaattcaatgacataaaactggctctcgccaggatagatgtcgctgatgacctgccgcagctgcccgagagtcatattctcctgttgcgcatgctgttcggtcagcgtatcgagcgtcaccgtcgaggtcgcggtcacggcaatggtgcaaaaatagccgtcatcttcatagcgcccaacgcgcagcacatcgccgggcttaaagtgcgactccgctgcatcgcgaatggtgatggttttgcgcccggcgaggatgtcgtcctgaaaacgctgaaaaaaggtaatgtcattggcctgcatgatataattccgtcctggtcattatgaattgtgagttcgccctgtgagtatgttctcccacgccgctgtcgccagtctcaataattttgagatgatggtctaccactacgtcattaaaaatcgtgacaaagtgatgtacatgaccatccgggaactggccgaggccgccggggtctccacgaccaccgtgttacgcttctgccgcaaactgcagtgcgagggctactctgaatttcgcgtgcgctttaaattatatctcgagcagaatgagcctcaacaggcaaatatcggcgccagcgaaataatgagcttttttaaaagcgtcaataatgacgagttcgatgaattactcgagcaggccgtcgatattattctcgcctccgaacgtattatttttgtcggcgccggcacctccggcgcgctggcgaaatatggcgcacgcttcttctccaacgtcggtaaattcagcaaccatattgacgacccctattttcctgtaaccaacgatatggcccgcaacgcgctggcgatcgtgctttccgtctctggcgagacggaagagatcctgcgctttgccagccagttcagcctgcatcattgcaaggtgatgtcgattaccagccatgagcattcgcggctggccaaactggctgatttcaatctctcctggcacgtgccgcagacgcgcattggcggcgtctacgatattacaacgcaaattccagtgatctatattctcgaatccctcggacgtaaattagcgcgcaaaatcagctaaaaataacagcctgtttttttgatgtaacatattacctttggcggaatttgttatatcgtgacattcactttcactttgctagactcgagaacaatagttattagagagattagccaggatgaaaaaattaacccttccgaaagattttttatggggcggcgcggtcgccgcgcatcaggttgaaggcggctgggatcagggcggcaaaggccccagcatctgcgatgtgttgaccggcggggcgcacggcgtgccgcgcgaaatcacccaccaggtcgaagcgggaaaatactacccgaaccacgaagccgtcgacttctacggtcgatacaaagaagacatcaaactgttcgccgagatgggcttcaagtgcttccgcacctctatcgcctggacccgcatcttcccgcagggtgacgaaacccagccgaatgaagagggactgaagttctacgacgacatgttcgacgagctgctgaaatacaacatcgagccggtgatcactctctcccacttcgagatgcccctgcacctggtgcagcagtatggcggctggaccaaccgcaaagtggtcgatttctttgtgcgctttgccgaagtggtcttcgagcgctataagcacaaagtgaaatactggatgacctttaacgagatcaacaaccagcgcaactggcgcgcgccgctgttcggctactgctgctccggggtggtctataccgagcatgacaatccggaagagaccatgtaccaggtgctgcaccaccagttcgtggccagcgcgctggcggtgaaagcggcgcggcgcatcaacccggacatgcaggtcggctgcatgctggcgatggtcgccctctacccttactcctgcaaaccggaagatgtcatgttcgcccaggagtcgatgcgcgagcgctacgtctttaccgacgtccagctgcgcggttactacccgagctatgtgttgaatgaatgggaacgccgcggcttcaacatcaggatggaagacggcgacgcgcagatcctgcgcgaaggtacctgcgcctatctcggcttcagctactacatgaccaacgcggtgaaagccgagggcggcactggcgacgccatttccggtttcgaaggcagcgtgccgaacccgcacgtcaaagcttccgactggggctggcagattgacccggtcggcctgcgctattctctgtgtgaactgtatgagcgttatcagaagccgctgtttatcgtggaaaacggctttggcgcctacgacaaagtagaagccgacggcagcatcaacgatgactaccgcatcgactacctgcgcgcccacatcgaagagatgatcaaagcggtcacttatgacggcgtcgatctgctgggctataccccatggggctgcatcgactgcgtctccttcaccaccgggcagtacagcaaacgctacggcttcatctacgtcaacaaacacgacgatggcaccggcgacatgtcccgctcgcgcaagaagagctttaactggtacaaagaggtcatcgccagcaacggtgagaacctgtaactaaccgccctctcccggccgggggagggctaattgcttatccgccagacacttctttacagctttaccattgccaaaacccgttcgcccgttaagataagcctcgtgaatatttgaggcaatcatgattaagcgacaacgcaaagccattctttttgtcctcctggcctgtctggtggtgctaacctgcaccgctcaacggatggccgggatgcacgcgctggtcatgaacctcaccgccgacagcccgtcgctacagcaaaaccaggatcaggccgaggcgccggtcacgccgtgcgagctcagcgccaagtcgctgatggccgttccgccgatgctgtttgaaggggcgctgttggctatcaccctgctgctggcggtgctggcggcgatcccgccgcgtatcgaacgccagtggcctccccgcgttatctccccaccccgattgcgggtgcatctgcgattatgcgtcttccgtgagtgattgattctcctgacagttcaggttaattcatcacttacggagcaaacttatgtatatggtattcaggcgactactggtctgcctgctttggctatggctgcccgtcagccaggccgccgacagcggctggctgcgcgccgccgacaatcaacacgccagcgtccgcctgcgggcgcaaaccgagagcaatggcgacactcgcctgcttttagacgtagcgctggaaaagggctggaaaacctactggcgctcgccaggggaaggcggcatcgcgccggctatcgcctggcacacgccgctggaggtgcgctggcgctggccgacgccgcagcgcttcgacgtcgcgggcatttccactcagggctatcacggcgacgtcagctttccgatgacgctgcgcgggaagataccgccgacgcttagcggcgtcctgacgctctctacctgcagcaatgtctgcattctcactgactatcccttttcgctggatatgacgactccggcgggggagcgatttaattatgattttacccgcgcgatgggcacactgccgctgcgcgatggcctgacttcgcagctgaccgccagctacatcagcggaaaactgacggtgaccgcccgccgcgatgccggctggcagcagccagcgctgtttatcgacagcatggaggatgtcgatttcggcaaaccgagctttaccacccgcggcgctacgttgaccgccaccgtaccggtcaccgacagctggggcgaagcggcgccggatctgcgcggcaaaacgctgtcgctggtgctggccgatagcggtcaggcgcaggaaagccaaatcgccgtcgccgccggcagcgccgcgccggggctggcgttaggctgggtgctgctgatggcgctggccggcgggcttattctcaacgtcatgccctgcgtgctgccggtgctggccatgaagctcggctcgctggtgcaaaccgaaggtcgcgaacgcggcgcggtgcggcggcagttcctcgcctcggtgtgcgggatcgtcgtctcgttcctggcgctggcgctgatgatgaccgcgctacgcctggggaatcaggcgctcggctggggcatccagttccagaacccgtggtttatcggcgcgatggcgctggtgatggtgctgttcagcgccagtttattggggctgttcgaaatccgcctctcctccagcgccagcactttcctcgccaccaggggcggcaacggcttaatgggccatttctggcagggcgccttcgccaccctgctggcgacgccctgtaccgcgccgttcctcggtaccgccgtgtcggtggcgctggtggcgcccctgccgctgctgtggggcattttcttcgccatggggatcggcatgagcctgccgtggctgcttatcgtcgcgtggccgggtctggcgcaacgactgccacgcccgggccgctggatgaatcatctgcgggtggtgctggggctaatgatgcttagttcagcgctatggctggtcagcctgctgacgatccacatcggccgtacgccggtgcttaccctgctggtgattctggccatcgccctgctagtggccaccgcctggcgctaccgctggcggacggcgctgcgcgcgggcgccctggccatagtggtggcgggcgccgtcgcctttgtcgcccaacaggacggccagggcccgcgccgcgaccgggttaactggcagccgctcagcgagcaggctatcgccagcgccctggcggagcataaacgggtatttattgatgtcaccgccgactggtgcgtgacctgtaaagccaataaatacaacgtgctgctgcgcgacgacgtccagcaggcgctgttagcgccagacgtagtcgccctgcgcggcgactggagccgcccctccgctgacattagccagtttttaaccgcacgcggcagcgccgcggtgccgtttaaccagatttacggaccggaattgccgcagggacagattctgcctgcgctgttagaccgcgaacaccttctcgccaccctgtccgccgctaaaggaaaataacatgagaactatcaccgcattattactgctgtgcgtatcggccttcagcttcgccgccccggcggaagaaccacaatcgaacggtaatgaccagttagcccagctgctgtttaacgatccaaatagcccgcgcaccggcgcgaaagagccaaaactcacgatcgtctcgtttaccgattacaactgcccttactgcaaacagtttgatccgctgctggaaaaaatcgtccacgataatccggacatccagctcatcgttaagctgctgccgtttaaagggcagagttcggtgaatgccgctaaaaccgcgctctccacctggcgtcagcagcccgataaattctgggcgctgcatcagcggctgatggcgaaaaaaggctatcacgatgacgccagtatcgccgccgcgcagaagaaaaccgctaccgatagcgtaaatatcgatgacaagaccatggattcgctgaagatgaacctgattttgtcgcaggtgctgaatattcagggcaccccggcgaccatcatcggcgatcagatggtggccggcgcgatccctgctgatgagctggaggggctggtgaaagagcagctggcgaaagcccgtggccagtaaaatcaggcgctggctgcgcgagctggcggtgtggctgctgattggcgcggcggtgagtctggcggtggattattttcgccagcccgcgctgccgcaaaacgtcagcgccacatcgctgcagacactcgacggcaggacgctggatctgcatgccatgagccagcaaaagccgctgctgctgtacgtctgggcgacctggtgcggagtttgtcgctataccacgccgtcggtggcatcgcttgccgccgacggcggcaatgtgctgacggtagccctgcgttccggcgataacgtcaagctggagaggtggctgaccaggaagaaaatgacgctgccgacggtgaatgatccgagcggccagctggcgcggcagtgggatatccaggtaacgccaacgctggtggtcatttctcaaggcgaggtaaagtcggttaccaccggctggaccagcggctggggaatgcgcctgcggctgtggctggcctcctggtagaccgtcgggctttagcggtttttatgccgggtaaggcgtatccgccacccggcctaccattcggctttgaccccgtaggcccggcaagcgcagtggactgcaccccaaaagttggacacccaactgagtaaggtgcaattttatggctaaaccaaagtattcccctgaaacaaaactggctgtggttaatcattatttgtccggtaaagacggagaacagagtacagccgacctttttggtattgaaagaacatctgtccgtcgctgggtcagggcatggcagttccacggtgcagaaggcctgactgcaaaaaataatcattattccgatgaatttaaactcgtggtcgtccgggcggttatcagtgaccgcctgacgatgcgtgaagcggctgcccggtttaatctctccgcagaaatacttgtccggcgctggctcgacgtgtacaacgatgccggagcggaaggtcttttaaacatacaatgcggacggcccggaaaaatgacaaagccaaaaaatatcccaccactgacagataaagagctggaaaaactctcccccgaagagctcagggccgaactgcgttatctgcgggcagagaatgcctatctaaaaaagttgaaagccttggttcagagcgaaaaaaatggcaaaaagccctgataatcagtgaactaaggcacgaacacgctctgcgggaccttctgcgggcggccggtatgtcccgtagcacgtggtattacaatatgaatgcactgaagcaaggggacaggtatgcgggtcttaaagagaacatcaggaagatataccactatcacaaaggtcgttatggctaccgcaggatcacgctcgtactgagaaaacaggggctgcggataaaccataaaacagtgcagcggctgatggcagaactgtcactccggtctgtgataagggcgaaaaaatatcgtgcctggaaagggagaacgggcgaggccgcgcccaatatcctgagccggaacttcggtgcgtcaaaagccaacgaaaaatgggtaacagatgtgacagagttcccggtacagggaaaaaagctttacctgtcgtcagttctcgatctgtttaaccgggaggttatcgcctacagcctgtcggaaaggccggtgatggagatggtgaatacgatgctggacggtgcgttcccgaagctcagaccgggagatgctccgctgctgcactcggatcagggctggcattacaggatgaggagctatcaggaacgtttaaaggcgcatgggatgacgcagagtatgtcgcgtaaaggaaactgcctggataatgcagtgatggaaaacttcttcgggaccctgaaatcggagtgtttttatctgagggagttcaggagtgtcagtgcgctaagaaaagccgtagaggactatatccattactacaacaacgagcggataagcctgaaattaaaaggcctgagtccggtagagtaccgaacccaggctctgagagccgcttaatatgaaccatccaactttatggggtcagtccagcagcgccgccgggcaatagacatctacgggttatttcccgcccgccagttcaaggaagctacccgtcacatacgacgctttgtcgctcagcagccaggcaatggcctgagcgacctcttccggctggccgccgcgcttcatcggtagcgaacctttcactcgatccacgcgccccggttcaccgccggaggcgtgcatctcggtataaatcagccccggacgcacgccgttgacccggatcccctgcgccgccacctccagcgccagcccggtagtcagggtatctaccgcccctttcgacgcggcatagtcaacgtactcccccggcgcgccaaggcgcgacgccgccgacgacacgttaactatcgccccgcccttgccgccatgccgatgtgacatgcgctttaccgcctcgcgacagcagaggaagtaaccggtgacgttggtggccagcacgcggttaatacgctcggcgctcaggctctccaccgtacactgggtaaataggatcccggcgttgttgaccagcgccgtcagcggctcgcccatgcggtcaactgcctcaaacatcgccatcacctgcgcttcatcgctgatgtccgcccgcagcgccgtggctttgccgccagacgccacaatggtatttaccacctcggtggcggcgttaatgttgtgatggtaattgaccgcgacggtatacccttcctgcgccagcagcagcgccgtcgcccggcctatgccgcggctcgcgccgctaataagagctattcccataccttccctccaaaaaaataaaggcgccgcagcgcctttaaaagtttagctaaaacgcaaacttactggtattcgctcatcggtacgcaggagcagaacaggttgcggtcgccgtagacatcatccagacgcttcaccgtcggccagtacttgttgtgcaaccctgccgggaataccgccagctcgcggctgtacggatggttccactcgcccaccagctcgccctgggtgtgcggcgcgttcaccagagggttatcctccagcggccattcgccggctttgacgcggtcgatttccgcgcggatcgccagcatcgcgtcgataaagcggtccagctcgaccttgctttccgattccgtcggctcaaccatcagcgtccccgctaccgggaaagacatggtcggggcatggaagccaaagtcgatcaggcgcttggcgatatccagctcgctaatgccggtctcttctttcagcggacgaatatcgagaatgcattcgtgcgctacgcgaccatcgcgaccggtgtagagcaccgggtaggcgtctttcagccgggtagcgatgtagttggcgttaaggatcgcgttctggctcgcctgcttcagcccttccgcacccatcatgcggatatacatccagctgatcggtagaatggacgcgctgccgaacggcgcggcggaaaccgcgccctggcgggtcagcataccttcaatctgtaccacgctgtggcccggcacgaacggcgccaggtgcgctttcacgccgattgagcccatgcccgggccgccgccgccgtgcggaatgcagaacgttttatgcaggttgaggtgcgaaacgtcggcgccgataaagcccggagaggtgatcccgacctgggcgttcatgttggcgccgtcgagataaacctggccgccaaactggtgcacgatctcgcacacttcgcgaatggtctcttcatacacgccgtgggtcgacggataggtgaccatgatgcaggagagattggcccccgcctgctctgctttttcacgcagatcggcgagatcgatgttgccgtttttatcacaggcaacgaccactacctgcatacccgccatctgcgcggaagccgggttggtgccgtgcgcggagctagggatcaggcagatatcgcgatggccttcgttgcggctctcgtgataatggcgaatcgccagcaggccagcatattcaccctgcgcgccggagttcggctgcatgcagacggcgtcatagccggtcagtttcaccagccagtctgaaagctgggcgatcatctgctgataaccttccgcctgctcgaccgggcagaacgggtgcagctcagcgaattccggccaggtgatcgggatcatctccgccgcggcgttcagtttcatggtgcaggagcccagcgggatcatcgcctggttcagcgccagatctttacgctccagggcgtgcatgtagcgcatcatctcggtttcgctatggtagcggttaaacaccggatgggtgaggatcgcatcgtcgcgcagcatcgccgccgggatcgaacggctatccagcgccacgtctttatccagggtatcgatatccagaccgtgatcgtcgccgacgatagcgcggaacaggttcagcacatcttcgcgggtggtcgcttcatcgagcgtaatgcccaccgcgccgtgaatatcgctgcgcaggttaatctgcagggcttcggcacgcgccagcaccgcggctttatccgccacttcgacgcacagggtgtcgaagtagtgggcatggcgcagcttcagccctttcttctgcaggccatcggccagaatgtcggtcagacgatgaatgcggccagcgatacgtttcagacccgccgggccgtggaataccgcgtacaggctggcgatgttggccagcagaacctgcgaggtacaaatgttggagttcgctttctcacggcggatgtgctgctcgcgagtctgcatcgccatgcgcagcgcggtattccccgccgcatctttcgatacgccgataatccggcccggcatggagcgtttgaattcatctttcgccgcgaagaaggctgcgtgcgggccgccgtagcccatcggcacgccgaagcgttgggcggaaccgaaaacgatatccgcgccctgcttgcccggcgccgtcagcagcaccagcgccataaagtcggcagcgacgctgacaatcactttgcgcgctttcagctcggcgatcagtttgctgtaatcgtggatttcgccggtggtgcccacctgctgcagcagcacgccgaagacatcctggtgatcgagcactttgtcggcgtcatcgacgatgacgtcgaagccgaaggtttccgcgcgggtgcgcaccacgtccagggtttgcggatggacgtcggcggcaacgaagaagcggttggcgctcttcagtttactgacgcgtttggccatcgccatcgcttcggcggcggcggtggcttcatcaagcagcgaagcggaagcgatatccaacccggtcagatccagagtgacctgctggaagttgagcagcgactccagacggccctgggatacttccggctggtaaggggtataggcggtataccagcccgggttttccagcatgttgcgctgaatgaccggcggcagctgcacggcggtatagcccatgccgatgtaagacttgaagcgcttgttgcgactggcaatcgccttcagctccgccagcgcggcgaattcggtagtcgcgtcgcccacctgcggtggggtcgccagctggatatcctgcggcacaatctggccgatcagggcgttaagcgaatccgcgccgacggtcttcagcatctcttgctgctgctgagcgtccgggccaatgtgacgttcaataaaggcgtcgcggttttcaagctgacttaaagtctgagtcatgagcgatggttcctgaaacgtgcggtgaatcgtggttgtctgactggtttgcccggcaagcgctgatgcttaccgggccagaatacgcaaaatcattcgcgttgcaggaaggcggcgacacagcgactccccgggagcttacaaaagtaagtgaccggggggagccaggaagccaacgcccctgcagcgtgaaggatgaagcgtatttattcgtcttccagtaaagcttcatacgcggcggcatccagcagcgcggcaacctgcgcttcgtcgctggctttgatcttgaagatccagccgtcggtatacgggtcgctgttgaccagttccggagagtcgttcagctcttcgttgacggcaacgatttcaccgctaatcggcgcgtagatatcggaggccgccttcacggattcggcaaccgcgcaatcggcacccgcttcaacggtggcgcccacttccggcaggtcaacgaaaaccatatcgccaagcagctcctgcgcgtgctcggtgatccctacggtataggtaccttccgcttctttacgcagccactcgtgttctttgctgtatttcagttctgctggtacgttgctcatcaattcatctccaaaaaagggaaatcacacaatggctttgccattgcgtacaaaaccaggtttagtcacttttaccggcatttcacggttacggatttgcaccaccgcggtgtcgccaatcccggccggcacgcgagccagcgcgatgctgtagcccagcgtcggcgagaaggtgccgctggtgataatgccttctttttgattaccgtcgctatcggtaaaacggaccggcagaccaccgcgcaggacgcctttctcggtcatcaccaggccaaccagctgctcggtgcctttttcgcgctgcatctccagcgcttcgcggccgatgaagttacgatcggcgggctcccaggcgatagtccagcccatgttcgccgccagcggggaaacaccttcgtccatctcctggccgtacaggttcatcccggcctccaggcgcagggtgtcgcgcgcgccaagaccgcacggcttaacgccagcgtccagcagaccgcgccagaaatcagccgcctgctcgttcggcatcacaatttcataacccgcttcgccggtatagccggtggtggcgataaacaggtcgccggcctgcacgccgaagaacggcttcatgccttccacggcctgacgttgagcgtcggtaaacagcgtcgccgccttcgctttcgcctgggggccctggaccgcgatcagcgacagatcgtcgcgaacggtaatttcaaggccgtaaggttcagcttgttcggagatccaggcgaggtctttttcgcgggtggcggagttaacaacgaggcggaaataatcttcagaaaggaaatagacaatcaggtcgtcgatgacgccggcggaggcggtcagcattccggtgtagagcgctttgcccggggtggtgagcttcgccacatcgttggccagcaaatagcgcaagaactcgcggatccggctgccgtggaaatcgacgatggtcatatgcgacacatcgaacatccctgcatcgccgcgcaccgcatggtgctcatcaatctgggacccgtaatgcagcggcatcatccagccatggaaatccaccatgcgcgcgccgcacagcgtgtgttgttcatacaacggagtctgttgagccatcttttcctcatcgaataaaacggaaccagccacgaaattgtcggcgattttgcgccacgaaattcggcatcggcatcgctgacggacgccgacgcaaacgttctctttggcctgaacttaccaccgaacccggcgctaaaccataagctcattcagggcatcacattagcttatggctaaaatccgccgaaaagcctacagagttattgactggaaaaaagcgatttacgccacataaaattaacattaacggcgcgacaattaggtaatgatggtgttttatgcgattttacggctctaatttctttaacaaaaaaaaggacgcattaataaatctaatgcgaaaaaagaggtgaaattagaatatttcaaatgagggggaaaacccggcgcccaggccgggtgaaagaagtgtgacgcggttaacgtaaccaggcaggcagatcgttgaggcccatcgcctggcgaatcagctgcggtttcacgcccggcagcgtatcggccagtttgagtcccacatcgcgaagaaatttcttcgccggatggctcccggagaacatttcgcggaagccctgcatgcccgccagcatcagcgccgcgctgtgcttgcggctgcgctcgtagcggcgcagataaagatgctggccgatatctttgccctgagcgtgcaggcgcttcagctcgtcaataagctcggcggcatccataaaaccgaggttgaccccctgcccggccagcggatggatggtatgcgcggcatcgccgaccagcgccagtcggtgggcggcaaactgacgggcatagcggccggtcagcgggaaaacttcacgttcacttgccagctggcagaggccaaggcgattatcgaacgcgatattcagcgcctggttgaaggtggtttcatcagcctgctgcatccgctgcgcttcccccggcgatagcgaccagacgatcgagcacaggtgcggatcgctgagcggcaggaaggcgaggatcccgtcgccatggaacgcctggcgggccaccgcctgatgcggctcagcggtacggatggtcgccaccagcgcatgatgatggtaatcccagaaggtcagcggaatatcggctttattgcgcagccatgaattggcaccatcggcgccgatcaccagccgcgcggtcagcatgctgccgtcctgcaggctgagaaaggcttcattctcgccccacgccacctgctgaagttccgccggagccagcagggtaacgtcagcgcaacgctgcgccttctgccacaatgcatgatgcactacggcattttcgataatatagccaaggtggctaaagcccatgctctggtcatcgaagctaatgtggccaaagctgtctttatcccacacttccataccgtgatagcagctggcccgctgggcgacgatctcgcgccagacgtccagcttcgtcagcagcttttcgctggcggcattaattgccgaaacgcgcagcgccggcggcgcatcggcggccagcggtcgcggctctgctttctccagcactgcgacgcgcaggccgctaccctgtagaccgcaggctaccgccagccccaccattccaccgccaacaatggcaacatcaacactttgcacgttctactccttaacggggaacccaaccgagggtacgctgcgccagcgcatcgcgcgccggggtaaataattccatcgccatcagaccgacgttgcgccccgccaccagcggcgcccaacggttggcaaacagatgcaccagcccatcggtcacgccgatggtggcggctttatcccctgccctgcgcgcctgatagcggcacagcagtggataatgaccgacatcttcgccgctgagatgggcgtcagcgagtaattccgccaggctcatcacatcgcgcaggccgagattaaagccctgcccggcgatcgggtgcagcgtctgcgccgcgttgccgaccagcgccaggcggtgcgacaccgcgcggctggcggtggtgagggccagcggataaacgctgcgcttcccggcgtgggtaatacgccccagccgccagccgaacgcctgctgcagctcctgacaaaagcgttcgtcagaccagctctgcacctcatcgcggcgcgactgcggatgacaccacaccagcgagcagcgcccttgcgacatcggcagcatcgccagcgggccatgctcggtaaagcgctcgaaggcgcgaccttcgtggggcaacgcggtgctgacgttagcaatgatcgctatctgctcatacggctgctgctgccagctgatgccgcagcgggcgcccagtgccgaacgggaaccgtccgccgccaccagcagcttaccgttaatgatttcgccgccctcaagcgtaaggctgacgctctcctggctgcgactgaccgcttccactttcgccggacagtgcagcgtgacgcctggcgcctcgcgcagcagaccaaacagccgctggccgacatcgtggagttcaaccacctggcccagcgccgacaggccataatccgcggccgccagattcacaaacccggcatgaccgcggtcgctgacgtgtactcgctggatgggcgtcgcgcgttcggcgaggcgttgccagataccgatacgcgccagctgctggcaggtgcccgcagccagggcgatcgcccggtcgtcaaagccagggtggcgtgaagaatgcggatcctgcgcttcaatgaggtggaccggcagcgcgccgccggtcaaacgggagatggccagcgcgagcgtcgccccggtcatcccgccgccgacgatcagcacgctcatgactggcgcgccgccgccatcagcgcctcgatctcatccgccttcttcaccacgccggcagtgagattttcgttaccgtcttcggtaatcacgatgtcatcttcaatacggatgccgatgccgcgatactgcgccggcacgtcggcatcggtggcgatatacagtcccggctcgacggtcagcaccattcccggctccaggacgcgcgaacggtcggtgtcgtaattaccgacatcgtgcacatccagacccagccagtggctcaggccatgcataaagtacgggcggtgggcgttgttggcgataagctcgtcaatctcgcctttcaggatccccagccgcaccaggccggtaatcataatgcgcaccacttcctggttgacctgacagatcgaggtgcccggccgatagagtttcagcgcggtctccagcgattcgagcacaatgtcgtagatctcgcgctgcggctgggtaaatttaccgtttaccgggaaggtgcgggtaatgtccccggcatagccgcgatactcgcagccggcgtcaatcaggactaaatcgccgtcgcgcagttcagattcgttttcggtgtagtgcagaatacagccgttttcgccgccgccaacgatggtgttataggaggggaaacgtgccccgtggcggttgaattcatggagaatttcaccttccagctgatattcgaacatgccagggcggcatttttccatcgcccgggtatgggccagcgcggtgatctccccggcgcggcgcatcacggcaagctcttccgcggatttaaacaggcgcatctcatgcacaatgggccgccagtcgataaccgagttcggcgcctgcagattctggcgcgagcctttgcgcagtttttcgagggcgttgaacacaatctcatcggcataggcatattcaccctgggcgaagtagatcgcgtccagaccgttgagcagctgatacagctgctggttgatttcgctgaacgccagcgcccggtcgacgccaagcttcgccggcgcggcctcctggcccagacggcgtccaaaccagatctcagcggtcagatcgcgaacccggttgaacagcacgctatggttgtgggtttcatcgcttttaatcaacaccagcagcgcttccggttcgttaaagccggtgaagtaccagaaatcgctgttctgccggtagggatattccgaatctgcactgcgcaccgcttccggtgcggcgaaaatcagcgccgcgctgcctggctgcatctgcgccaacagcgtctggcgacgcgatagaaattcctgctgagtcatgacgccccctgaacgaattttagttagtgtaatgtcggtttgcggacttccggtgcggttggctgctgacgggcaaaggtgtcgtggcacagcagtgcggcaacgcggacatactcgataatctcctccagagacatctccagctcttcctgatcttcgtcttcatcgtagcccagctgggcaatattacgcagatcgtcaatcgcttccccggtttcatccttcactttatccagcttcggctggctaacgccaagaccaagcaggaagtggttgacccaaccggcgagggcgtcggcacggtcaaagacgctcaccgcatcgccttccggcagatacagttgaaagaggaaaccgtcgtcatccagtgaatcgctgatggcggaatgcatgttacgcagcgcctgagccagttcatggccaaaggcgagaccttcgttggtcaggtcgtgcaccagcggctgccagctgctgtccgtattgccgccgcacagcaatccgctgatcaaaccgtgcatttcggccggggtgagacctaccccttgttggttcagtaactggtatacatcgttgtaaccaggcatttcgttctgtatagacatgcgcattcgtcatcgttgggaggaatattcatggtatgctaccactttggaccctggtgaaccagaatagggcttgtatcttcgcaccagggtagctatagtgtcgccccttcgcagacccgggccagggtgtgaaggcagcgcagtcaatcagcaggaaggtggcatgtctgcacaacccgtagatctccaaattttcggccgttcactgcgagtgaattgcccgcctgaacaaagggatgccctgaatcaggcagctgaagaccttaatcagcggttgcaagatttaaaagaacgcactagagtcacaaatactgagcagctggtcttcatcgcggcgttgaacatcagctatgagttgactcaggaaaaagcgaagacccgcgactacgcttccagcatggagcagcgcattcgcatgcttcagcagaccatcgaacaagcattgcttgagcaaggtcgcataagcgaaaagccagggtcgaagtttgaataacactttgcagttaactgtgttagagtaatcgcaagaacaaaatttctctgagatgtttgcaagcgggccagtcccctgagccgatatttcataccacaagaatgtggcgctccacggttggtgagcatgctcggttcgtccgagaagccttaaaaccgtgacgacacattcaccttgaaccaagggttcaagggttacagcctgcggcggcatctcggagattcccttctttacttcgcatcatcccccatacgtgttttcggctgaagccgccctgtattacacttgctcctattgtttcgccagctcgtaacgagacctgcatgactatacagcccgataccctgctctcccgtcagcatattcgccagcagatccgcgatcgtcgacgcgcactcagcccggagcaacagcgcctgtttgcccaacaggccgccgagcgaatgatggcctggccgccggtagttctcgcccacaacgtggcgctgtttctctcctttgacggcgagctggacacccagccgctgatcgaccagctctggcgcgccggcaagcgggtatatctcccggtgctgcatccctttagccccggcaatctgctgtttttacactaccatccgcagagccaactgatcgtgaatcgcctgaagatccgcgaaccgaagctcgatgtgcgggatgtgctgccgctggctgaactcgatgtgctggtgaccccgctggtggccttcgatgtcagtggccaacggctgggaatgggcggcggtttttacgaccggacgctgcaaaactggcagcagtatcgcctgcagccggtgggctacgcgcacgactgccagcaggtggatagcctgccgagcgaagagtgggatatcccgctgccggcggtcatcaccccgggaaaaacctggtgttggtaggtacgcggggacgagaaattcagcctggaaagtattaacaaaaaaacgggcaggtacgcgacctgcccgagaggcaaaaatgattagaacagcagacgggcgcggatagtccccgggatcgctttcattgcctgcagcgcctgctgggcaacatcttcttccgcttcaatatcaatcaccacgtagcccatctgcggcgacgtttgcagatactgggcggcaatgttgatgctctgcgcggcgaagatttggttgattgcggtcaggacgcccggccggttctcatggatatgcagcagacgacggccgccgtgcagcggtagagaaacttccgggaagttaactgccgacagggttgacccgttgtcagagtatttcgccagcttgccagctacttccagaccgatgttctcctgcgcttcctgagtggagccaccgatatgcggtgtgaggatcacgttatcaaactcgcacagcggcgaagtgaaggggtcgctgttggtcgcaggttcagtcgggaagacgtcgatagccgccccggccagatgcttactggccagcgcatcgcatagcgccggaatgtccaccacggtaccgcgggaggcgttgatcagcagcgcgcccggcttcatcagcgccagttcttccgcgcccatcatatttttggtagaggcgttttccggcacgtgcaggctgaccacatcgctcatgttcagcaggtcggagagatgctgtacctgagtggcgttgccgagcggcagtttgttttcaatatcatagaagaagacgtgcattcccagcgattccgccagaatgccaagctgggtaccgatgtggccgtaaccgatgatgcccagctttttaccacgcgcttcgaagctgccgaccgcctgcttgttccacaccccgcggtgcgctttggcgttggcttccggcacgccgcgcagcatcagcagcagttcgccgatcaccaactcggccaccgagcgggtgttagagaacggcgcgttaaacaccggaataccgcgcttcgcagcggcgttcagatcgacctggttggtcccgatgcaaaagcaaccgacggcaaccagtttttccgctgcggcgaaaatctcttcagtcagatgggtacgggaacgcaggccgatgaaatgggcatcacggatcgacgctttcagctgttctgaatccagcgcgcctttatgaaattcaatgttggtgtaacccgctgcgcgaaggctatcgattgccttttgatgcacaccttcaaccagcagaaatttaatcttgtctttttccagtgataccttagccatttccccgtcctgttttgtcttaactgatgtcgtgctgaacgaaagttcgtctcagcaacatatcaaaaaaaactatcgcggcaatatgaacgtttgcgtcgccgtcctgaagaaatgtcatccagagggaaatcgcaggacaaaacaccagaaagagaagaaatggtagcgtgtaaatcagaatggttgcataaatgtgacagaagtcaccaaattgcacctgatgaaaaaatatttgcgagggagccggtcggctccctgcggacagactattttacgatggtcttcacgccgtcggcagtgccaatcagcgccacgtcggcgccacggttggcgaacagccccacggtgacgacgccaggaataccgttgatcgcgttttccagcgcgatcgcatcgagaatttccaggccgtgcacgtcaaggatcacgttgccgttatcggtcaccacgccctgacggtactctggacggccgcccagcttgaccagctgacgcgccacggcgctgcgcgccatcggaatgacttccaccggcagcgggaacttgcccagaatatcgacctgcttggaggcgtcggcgatgcagataaatttatccgcgaccgaggcgatgatcttttcacgggtcagcgccgcgccgccgcctttgatcatctgcatatggccgttgatctcatccgcgccgtcaacatagatccccaggcgatcgacgctgttaagatcgaagacggtgatcccgaggcttttcagcttctcggtggaggcgtcggagctggaaaccgccccttcgatctgccccttcatggtgcccagcgcgtcaataaaatgggccgccgtcgagccggtgcctacgccgacaatagtccctggctgtacatattgcagtgctgcccaacctaccgcttttttcagttcatcctgcgtcataattctggtccgagatgtgaatgcctgtggcgcattatagaacatcgatagtggaaatgtccctgcgatgcagatcacacaactgaacagaccaatttcgtctgtatcaaataaaaatttatgtcatagtgcgagataacgattagttatgggggcacgccagaataatgaaacgaccggactacaggacactacaagcgctggatgcggtgattagggaacgaggatttgagcgcgccgcgcagaagctatgtattacccagtccgccgtctcacagcgtattaagcagttggaaaatatgttcggccagccgctgctggtgcgtaccgtgccgccgcgccccaccgagcaaggacagaaactgctggctctgttgcgccaggttgaactgctggaggaagaatggctgggcgatgaacaaaccggctctacgccgctgctgctgtcgctggcggtgaacgccgacagtctggcgacctggctgctgccggcgctggccaacgttctgtcagactcccctattcgtctcaacctgcaggtggaagatgaaacccgcacccaggagcgcctgcgccgtggcgaagtagtgggcgcagtgagtatccagccgcaggcgctgccaagctgcctggtggatcagctgggggcgctcgattacctgtttgtcgcatcaaaagagtttgcgcaacgctatttcccgaatggcgtgacgcgttcggcgctgcttaaggcgccggtcgtcgccttcgaccatctggacgatatgcatcaggcgttcctgcagcaaaacttcgacctgccgccgggcagcgtcccctgccacatcgtcaactcgtcggaagctttcgtgcagctggcgcgccagggcaccacctgctgtatgatcccgcatctgcagatcgaaaaagagctcaacagcggcgaacttatcgatctcaccccgggcctgttccagcgccgcatgctctactggcaccgcttcgccccggaaagccgcatgatgcgccgggtgaccgatgcgctcattgactacggacacaaggtgctgcgtcaggattaaaccgcgggcataaaaaagccacttcgctgaagtggcttttttgtttctatcgcttactgggccggtttcggcgtttccgccggtttcgccggggtggctggagcagcggcttgcgccggctgcagctcaaagactacatcgacctggtcgtcaaactggatagtcgcctgctcgtaggtttcctgggcagaaaccggcgcagcgtcagcggccttcatcatgcgaaccatcgggctcggctgatagttggagacatggtagcgcacgctgtacaccggacccagcttgctgtggaagcctgcggccagctcctgcgcctgatgcacggcgtcgtcgatcgccgctttacgcgctttatctttgtaggcgtccggttgcgcaacgcccagcgagacggagcgaatctcgttgagacccgctttcagggcgccatccagcagaccgttgagtttatccagctggcgcaaggtcacttccactgtgcgcaccgcgcgatagcctttcagaatgcttttcccgttctgatagtcgtaatcaggctgggtacgcagattcgccgagttgatgtcctttttagcaataccgctcttttcgaggaaagagagatattgcgcaacgcgatcgtcagcctgtttttttgccgacgcggcgtcttttgccgacacgttcacttcgatcgccagggtggcgatgtccggaaccgcggcaacgcttgctgtgcctgaagtcacaatgtgcgggccatccggcaattcgctggcctgtgccgccatcgtggtcaatccgagtgttgccgccagggctaagacttttaacttcactgtcgtttctccatgttacttaaatcgcccttacgggacgcatgccagcaagcttagcgcgtacagcaggaaagtccatcggacaacgcttagttaagcaacgcctggatatggctgacgccttctcttgccagctgaaacgcaataaaccacatgacggcgccgaccacaatattgatgatccgctgagctctggcggtacgcagtcgcggcgccagccaggcggctaacagcgccaggccaaagaaccacaggaaagaggcgctaatggtccctagcgcaaaccagcgcttcggctccaccgccagctgacctcccaggctgcctaacaccacaaaggtgtccagataaacgtgcggattaagccaggtcaccgccagcatggtgataatgattttccagcgcccctgctgcattacctctgcattggcgagttcaagactctgactgaacgccgttttcaatgcgccgaagccatagcacagcaaaaaggccacgccgccccaggtcactagcgccagtagccacggggattgcatcagcagtgcgctaccgccgaaaatgccagcgcagattaacagcaagtcgctgaccgcgcatagcagggcaatcatcagatgatactgacgacggatcccctgattcatcacaaaggcattttgtgggccaagcggcaatatcatagccgctcccagggcaagcccctgaaagtaataagtaaacataaggatttatccgctgagttcgagagtggcgctgactatagcgcgaatgaattattagcggaaattgaaagaattaatcattaattagaacaactaatgatgagctattgaaaaaggccggcatggccggcctgagttattgagaggcgctttactctgctttttccggcaggcgcaccacatgaacatccatctgcgggtaagggaagctgatgccgttggcgtcaaattcacgcttgatacgctcgaggatatcccagtagacgttttgcagatcgctgcttttgctccacacgcgcaccacgaagttcaccgacgaggcgccgagttcgttcagacgaacggtcatttcccgatcgcgcagaattcgatcgtcagattcgataatcgaggtcagtagctgctttaccttgtcgatatcagcatcgtaagcgacgccgataataaactcattgcgacgcgcaggctccctggagaagttaatgatattgccggcgatgattttcccgttcgggaccaccactactttaccgtccgcggtacgcagggtggtggagaaaatctgcacgttcaacaccgtacctgccacgccgccaaggtcgacatactcgccagcgcggaacgggcggaacatcaccagcagtacgcctgcggcaaggttcgacagcgatccctgcagcgctaaacccaccgccaaaccggcagcacccagcaccgcaatcaccgaggcggtctgcacgcctacccgccccagggcggcaatcagcgtaaaggcgataaccgcatagcgcaccagcgcagagagaaaatcggccacggtagcgtcaattttacgcgccagcatcaggcggttgacggtattagagacgacgcgcgccacgatcatcccgacgatcaggatagcgatagccgcgacgatgttgacggcatagctcagcagcagctcctggttgcgtgccagccacgtcccggcgtggttgatgctatcgacaacgttcaaatcttccatttaacattccttatgaatcccctggggggaagtaaataactcagcctgcgacagggcagtcaggttatagggtaaacaataagtgcacgttttgccaaatggatcacagttttctgccgcgctatcctgttgttaagataataaaaaagcccgcattgctgcgggcttccgggtaagaaacagatttttcttacagaacgtcgatcgcgttcagctctttaaatgcctgctccagacgagtcaccatggaagtctgggcagcacgcagccatacgcgcgggtcgtagtatttcttgttcggctggtcttcgcctttcgggttgcccagctggccctgcaggtaagcttcgttcgctttgtaatactgcaggataccgtcccaggttgcccattgggtgtcggtatcaatgttcattttcaccacgccgtagctgacggagtctttgatttcctgagcggaagaaccggaaccgccgtggaacacgaagttcaggctgttgtgcggcaggttgtgtttcttggaaacatattcctgagagtcgcgcaggatggtcggggtcagaactacgttacctggtttgtacacgccgtgtacgttaccgaaggaagcggcgatggtgaaacgcgggctgattttgctcagctcggtgtaggcgtaatccacgtcttccggctgggtgtacagggcggaagcgtccatgtggctgttatccacgccgtcttcttcaccgccagtgcagcccagttcgatttccagggtcatgcccattttggccatgcgagccaggtacttagagcagatctcgatgttttcgtgcagggactcttcagacaggtcgatcatgtgggaagagaacagcggtttgccagtagcggcgaagtgtttttcaccggcgtccagcaggccgtcgatccacggcagcagtttcttcgcgcagtggtcagtgtgcaggataaccggcacgccgtagtgttcagccatctggtgcacgtggtgggcgccagagatagcgccgaggatagcagcaccctgaggaacgtcagttttcacgcctttacctgcgatgaacgctgcgccgccgttagagaactgaacgataaccggagagcgaactttcgctgcagcttccagaacggcgttgatggaatcagtacctacgcagtttaccgccggcagtgcaaagttgttttctttcgctacctggaacactttctgaacgtcgtcgccagtgatgacgcccggttttacgaaatcaaaaattttagacatgttacttagtcctgtatctgtatcttcgaccgttgaagaaggttcgcgagcccttaagcgcgctgaaaaacaggcgggtttccccgcctgaactgaattactgcttagcgcgctcttcgagcatcgctactgccggcaggactttgccttcgacgaattcaaggaatgcgccgccgccagtggagatgtaggaaattttgtcagcgatgccgaacaggtcgatcgctgccagggtgtcaccgccgccggcgatggagaaaccttcgctgtccgcgatagcgttagccacgatttcagtccctttacggaagttagggaattcgaatacgccaaccgggccgttccacaggatggttttggcgttcttcaggatttcagccagtttctgtgcggaaacgtcgccaaggtccagaatctgctcgtcatctttgatgtcgttaacagatttcagggttgccgttgcggtttcggagaactcggtcgctacgcgaacgtcggtcggaaccgggatatcgcaggtgcccagcaggcgcttggcttcatcaaccagatctgcttcgtacagggatttaccgacgttgtggccctgagcggcaacgaaggtgttagcgataccgccgcccacgatcagctggtcagcgattttagacagggaatccagaacggtcagtttggtggacactttagaaccaccaacgatagcgaccatcggacgagctggctctttcagcgctttacccagcgcgtccagttcagcggccagcagcgggcctgcgcacgccacgtcagcaaatttgccgatgccgtgggtggaagcctgcgcgcggtgcgcagtaccgaaagcgtccatcacgaacacgtcgcacagcgcagcgtatttcttagacagttcttcgtcgtcttttttctcgcctttgttgaagcgaacgttttccagcaccaccagttcaccggcagccacttccacgccgtccaggtagtctttaaccaggcgtaccgggttggacagtttgtctttcaggtaattaacaaccggcagcagagagaattcttcgttgtactcgccttcggtcggacgacccaggtgagaagtaaccatgactttcgcgccctgcttcagcgccagttcaatggtcggcagagatgcacggatacgtgcgtcgctggttactttcccgtctttaactggtacgttcagatccgcacggataaaaacgcgtttaccagccagatccagatcggtcatcttaattacagacatggtgaatcctctcgttgattcataaagttttgtcgacgtttacgcgtcgaacctgaaaccaatagccgccatcgctaacgtcgtgtcgagcattcggttagcaaagccccattcgttatcgcaccagaccagcgttttgatcagatgcgcgccactgacccgggtttgcgtaccatcgacgatggcgctgtgcggatcgtggttaaaatctgtcgagaccaacggtaattccgtatagtcaactataccatgaaatgcaccttgtgctgctttttgcagcaactggttgacttcacatgcttttaccggttttttcaccgtcacgctcaggtcaattgccgtcacgttaatcgtcggcacccgcacggcaatcgcttcaaaacggtcgttaaattgcggaaaaatacgggtgatccctgccgccagtttggtatccaccggaatgatcgactggctggccgcgcgggtacgccgcagatccggatgataagcgtcaatcacctgctggtcatgcatcgccgagtgaatggtggtgacggtgccggactcaatgccataggcgtcatcgagcagtttaatgatcggaataatgcagttggtggtgcaggaggcgttggagacaatgcgatgcccggcgcgaagttcatcctgatttacgccgtacaccaccgtcgcgtcgaggtcgttgccgccggggtgggaaaagagcacttttttcgcccccgcctgaagatgggcctcaccgtgttcacgactcccgtataccccggtacagtcaagcacgacgtccaccgccagttcgcgccagggcagcgccgcaatggtcggctcatgcagcagacggatggaatcgtcgccaacaaacagctgctcgcgctcctgacggacatcccaggcgaaacggccatggctggtgtcatatttcaataaatgcgcgatgcccgcggcatccgccagctcattgattgccaccacggtgatttccgcacgacgcccggattcatatagagcacgaaccacgttgcgtccaatgcgaccgaagccattaatcgcgatgcgaatggtcatagatctcctgcaaggctgtccctgttatgaggtggctgacagagtaatccagcaacgctctgaggggaaccttaccagctgcaaactgcgactgattgattaattgtcgaacatttaaacgactgaaacgcttcagctagaataagcgaaatgaggaataaaaggaatgtttgtccagcgcaataaaccagctatatgactcacatcacatttttgctggaataatttacaaccgtattacatggttcaggaatagcagatacaaaaaagccgggtggcgagataaaagcaaaacggtaacccaggggttaccgttttggtgtttgcaccctctcctgtgggagagggttggggtgagggcatcagcccgcaccgtaccagcgattacagcagcgctttcgctttagcgaccacgttatcaacggtgaagccgaactcctcgaacagctgctcagccggcgcagactcaccgaaggtggtcatgccaacgatagcgccgttcaggccaacgtatttgaaccagtagtcagcgatacccgcttccacggcaacgcgcgcggtcacggctttcggcagtacggattcgcgataagccgcatcctgcttgtcgaacgcgtcggtggacggcatggaaaccacgcgcgccttcacgccttcggcagtcagtttgtcccatgcggcaaccgccagctccacttctgaaccggtggcgatgaagatcagctccggctgcgagccggtgcactctttcagcacataaccgccgcgggccacgttcgccagctgctctgcggtacgctcctgctgcgccaggttctgacgggagaggatcagcgcggtcgggccgtcctgacgctccacgccatatttccacgcaatcgcggattcaacctggtcacacggacgccaggtggacatgttcggggtcacgcgcagggaagccacctgctctaccggctggtgagtcgggccgtcttcgcccagaccgatcgagtcgtgggtgtagaccatcacctgacgctgtttcatcagcgcggccatacgtaccgcgttacgcgcgtattccacgaacatcaggaaggtggaggtgtacggcaggaagccgccgtgcagcgcgataccgttggcgatagcggtcataccgaactcgcgcacgccgtagtggatgtagttcccggcagcgtcttcgttgatcggcttagagccggaccacagggtcaggttggacggcgcgagatctgcggagccgccgaggaattccggcagcagcgggccgaaggcttcgatggcgttctgcgaggctttacggctggcgattttcgccgggttggcctgcagcttcgcgatgaactcgttagctttcgcgtcgaagtcagacggcatctcgcctttcatacggcgggtgaattcggctgcttcctgcgggaaggctttggcgtaagccgcaaacttctcgttccatgcggcttctttcgcctggccggcttctttggcatcccactgggcatagatgtcagacgggatgtcaaacggcgcgtgtttccagcccagcgcttcgcgggtcagggcgatttcggcgtcgcccagcggcgcgccgtgggagtcgtgggtaccggctttgttcggcgaaccgaaaccgatgatggttttacacatcagcagggacggtttgtcggtgaccgcccgcgcttcttctaccgcgcgtttgatggcgtcagcgtcgtgaccgtccacgccgcgcaccacgtgccagccgtaggcttcaaagcgtttggcggtgtcgtcggtgaaccagccttcaacgtggccgtcgatggagatgccgttgtcatcatagaacgccaccagtttacccagtttcagggtaccggccagggagcacacttcgtgagaaatgccttccatcatgcagccgtcgcccatgaaggcgtaggtgtagtggtcgacgatatcgtgtcccggacggttgaactgcgccgccagggttttctcggcgatagccatcccgaccgcgttagcgataccctggcccagcggaccggtggtggtttccacgcctgcggtgtagccgacttccgggtgacccggggttttggagtgcagctggcggaagtttttcagctcttcaatcggcagatcgtagccagtgaggtgcagcaggctgtaaatcagcatcgaaccatggccatttgacaacacaaaacggtcacggtcagcccaggccggattgttcgggttatggttcaggaaatcacgccacagcacttcggcaatgtcagccatacccatcggggcccccgggtggccggatttggctttctgtacagcgtccatgctcagcgcacgaatagcgttagcaagctctttacgtgaggacattttgactccagttcggactgttgaaggccatgcccttaacgacttgacgagagcgcgttttgggctacgccggaaaaaagtgtgaacaatgtaacccaagcgacaagtcatgtacatggagcatccttttgccctttaagaaatctctggaacaggttgtgctacgccggaatccgctcgcccgcatcctgcgatactctttataatttacgcagaatacggttccctgccgtcgccgtattttcggataaacaaccataagattgtggaagataaaaatgaaaattcgctcaaccgtacttgctcttgggatcgcagcaaccctcaccggatgtcagaacatggactccaacggtctgctcagctcaggcgccgaagccttccaggcatactctctcagcgacgcgcaggtgaaaaccttaagcgaccaggcctgtaaagagatggacgccaaagcgaaaatcgccccggccaacagtgaatacagccagcggctgaacaaaatcgcggctgcgctgggcgataacatcaatggtcagcccgtgaactacaaggtctatgagaccaaggatgtcaacgccttcgccatggccaacggctgcatccgcgtctacagcgggctgatggatctgatgaacgataatgaagtcgaggcggtgatcggccacgaaatgggccacgtcgcgctgggccacgtgaagaaaggcatgcaggtcgccctgggtaccaacgccgtgcgtgcggcggcggcctccgcgggcggtatcgtcggtagcctgtcgcagtctcagttgggcgatctgggcgaaaaactggtgaactcgcagttctcccagcgtcaggaatcggaagcggatgactactcttacgacctgctgcgtaagcgcggtatcaatccgtcgggactggccaccagcttcgagaaactggccaagctggaagccggccgtcagagctctatgtttgacgatcacccggcatcggaagcccgcgcgcagcatattcgcgatcgcatgaaggccgacggcattaaataagcgacagcgggaggcgttattgcctcccttttttatatatccgtaaaaatatttagccgcattaattgataatttaagcgcacaaaccgttaattattatcacagcgcatcacagccaattattttatgcccggcgattcagaaatatattatttggtaaattaaaaaggccgcacactatctggcttccagaatcgtctttacccgaataataaatagtccaccccttactgcctggcgcacggctcatgcaccatacaacctgtttccggctgcaataactgctcacacaatgattgctttcgacattatttcaggagaatatctggtcagcagtgattcccttgaatatatcgacagacagagaagtgccctcagtgaaaaaagaattaccattaatcgcacttggcattattgccgccgcgccggctttcgccagccaacaatctaccagtcagggctttattgaagacagccacctggatctctttttacgtaacgcttatatcaaacgcgattatcgcgatggtttgccggataaagccgaatggggtcagggtatcatcgcgaccttcgagtccggctttactcaagggccggtcggcttcggcgttgacggcattgcacagtacgccgtgcgcctcgacggcggccgcggccgcagcggcgcgggcggtatcgactttttcgcccaggatgatgatggccgcgcgaagtccgatttagcaaaatttggcgctaccgctaaaatgcgcttctcgaataccgtcctcagctacggcagccagcgcccgatgctgcccatcgtctacgccgatgactcgcggctgctgtacgagagctataccggtaccatgctgacctcaagagaaatcgacggtctggaaattaacgccggttatctcaccgatcagcagcgcaaaagcgacgacagccacaatagcggcctgaagagcctgacctttggcggcgccagctatcaattcaacgaccagctcagcggcgcgctttacgcttcgcacgtcgaagacgtgctgaataagcagtatctcggcctgaactacaagcagccgttcgccgccgaccagcagctgattgttgacttcaacggctataactcgcgcttagatcaagaatatgccgacgccaatgacaccgggcgcagcaacagcatctggagcctggccgccagctatatctgggatattcacacttttaaggtcgcttaccagcaaagcagcggcagcaccggctaccactacggcgggtatcagaatcagggcggcgttggcgatggcggcaacaccatctggctggctaactcctactggtcagattttaacggcgaggatgaacgttcctggcaggcctcctatggcctggattttgccggactgggcgtaccgggcctgagctggaccaccgcctacgttcgcggggataacattaaaaccgccgagaccagcaacggtaaagaacacgaatggttcaaccaggtgcagtaccaggtgcaaaacggcatggcgaaagatttgaaattgagactccgctattcggtgctgcgcgtttccagcaacgccagcgactataacgtcagcgggaatgaagtgcggttctacgtcgaatatccgtttaacgtgttttaaccatataatgaaccctctccagtgagccggccctctcccggcgcgcaggagcaaccgtccggcgccttgattaaccccctgtgccgtgcggtaccctctccccggaagggagagggttggggtcactgggttatcattaatacagcgtcttctgcggcgggccggcaaagcgcagcgcgccaatctggcccatcttcacttccaccaccgatggccccggcatcgccagcgcttcggtcatcaccgcctggaaatcctcagcccgatccacgctccacgcctgcagacccatcgcctgcgccaacagggtaaagtctggcgagtgcagctcgttgtaatactggcggccgccaaaatacttatcctgaataccgcgcattacgccgtagccgccgtcattcataatcaacagcgtcacgttggccttctcctgcgccagggtcgccagttcgccaaggttgaggctcaggccgccgtcgccgaccaggccgaccactttacgttgcggattggcaatcgcggtacccaccgccatcggtagccccataccgatggctccggccagagaatggatattcatcagcgggccgtgagcgcggaacagacggctgccccacaggctgccggaaacggtaatatcgcgcaccaggatgccgtcatcgggcagcgcctgcgcaatcgcgtcattcaatttagcgtaatcgccgcactggtcgcgcagcccccgctccgccgcctctaccgcctctttaagctggctatcccaacgcgcatcgccccatatccggccctgcacccgcgctgccagcgccgctaatagcgcccggcaatccgccaccagggtattgtccatcaagtagttacggctggccgccgccgggtcaatatcaatctgcacccgcggcgtgggcagttccagcgtccacgagcgcgtttcgttgctgcgcagccgggaaccggcaacaagtgtgaaatcacattgtgaaatcagcgcttcaaccgagggagaattatgaaacgcgcgcaggctggcgcgatggctgtccgccagaatgccgcggccgtgggtactggaaatcaccgtcaccccggcatccgccagcgtcttcaccgcctcgccgctctctaacgcgccgccgccaagccacagcagcggctgcttcgcctgcttaagctgcgcccacagcgcatcgaccagcgacgcttccggctcaaccgccggagcgcgtttcagcggcgcggtcagcagtgaaagcggaattttggcgctctgaatgtcgattgggatctccaccgagaccgggccgcacggcggcgtctgcgcctcctgaatcgccttatgcaggatagccaccgcctggttggcgttgctaatgcggtaagcgcgcttcgaactggctttcaggaaggtcaattgatcgcgggtttcatgaatgaaaccggtgtcggcgtccagccaggctttttcgacctgtccggtcaggtgcagcagcggcgtaccggcgttcatcgcctcaaccagcgcgccgaccgcattacccgcacccgcgccggtactggtcagcgccacgccgagccctgaaaaacggccgtgggcgtcagccatggtcaccgagcccgcttcaccgcgcgccggaacaaagcggattttttcccgctggccgacggcatcggcgatcggcaggttatggatagaaatgacgccataaatggcttcaacgtgatactgctccagcgttctggcgatggcatcgccgacggttatcatttcgctcattgctcaccctttctcagtcgcaccagtggttgacgctattacccgtcgccagataaatgctcttttgttgcatccaggctttcagcccctggatccctttttcgcggcccagaccgctctctttaaagcccccaaacggggtcgaaatggagaaaactttgtaggtgttgatccacaccgtaccggcttccagttgttcgctcagacgcagcgcgcggccggtatcacgcgtccagatccccgccgccagtccgaagaccgaatcattggcctcgcggatcagcgccgcttcatcgtgaaaacgcatcgccaccagaaccggtccgaagatctcttcctggcaaacgcgggcctgattgttcagcccttcaatgatggtcggcaggaaatagctgcctgccgccagcgccggatccgccgggatctcgccgccgcatagcacgctgccgccttcgcgtttcgccagctcgacgtactccagcacgctctgccggtgtttatcgttgatcagcggcccgacgtgggtgccagcgctgaacggatgaccaacccgcagcccttgggttaactccaacaggcgggccattaattgcggatacactttgtcatgaacaaacagccgcgagccggcaatgcaggcctggccgccggagctgaaaatgccgtagcagatgccccgcgccgcctgttcgatatcggcatcttccagcacgatggtcggcgatttgccgcccagctccagtgacgccgggatcagcttttccgccgccacgtgcgccaggtgacgtccggtggtggtgccgccggtaaaggaaattttgcgcaccttaggatggcgggccagcgcatcgccgataatcgatcctttacccggcagcacgctcagcagtccggcgggtaaaccggcctgctcaaagatcttcgccagctccagcgccatgagcggcgtggcttccgccggtttgaggatcaccgcatttccggcggcgatcgccggggccaccttctgcatttcgctggcgatcggcgagttccatggggtgatcgccgccaccacgcccaacggctcatagcggctcagagtcaatagatccgcctgccgcggcgtcggcagctcgccttccagtaactcgcaggcggcggcaaaatagcgcgccgtccccgccgcgctcatcaccagccctcgcgcttccgccagcggtttaccattatcgcggctctgcttttgggtgagctcatcaagctgtgcttcaatcagatcggcgactttatgcaggatcttcgcccgctgatgcggcagcatcgcccgccacgttggctcccgccaggcgcggtcggcacagtcgatcgcctcctgtaaatcatcgaggcttgccgcatgcagcgccgcgttaatagcgccatccgccggaaactggctgtgcatcaaattgccgccgccgcgacgccactgaccgccgataaaaatgtctaattcgtccatctcagcctctctgcgttatgccagttcacggcaggcgcgtaccgcgctcagtgccgcgagggtcgatgttttcggattgctggcgagcggcaggccgctcagctccaggtgaaactcgccgaacaatccttcggcgtgtagcgtatgggtgttacgttgcgtcgccggatcgaccatcagctgtactcgggtcgcgtcaaggccgataccgcccagcgcgatggttgccgccacgttggcatttgccgggaatagccgcgccgcctcgcgggcgctgccttcgaagaaaatttgcgcttcattgaccgcgctgaggtcgataagctgttcggcatagctgccgcgccagctggccgggcttttacgcgactgataggtcactcgttcaagccccccctctttggccgccgccaggccgtcaatcccggctactgcgccagccagcagcgtcaacttgccgcccgcctgacgtaaacgctgttccagttcgctgtccgccaacgcaccggtcgagatcaccgccagatgccagccgcgcgccagtaccgcttcgccgtattgcgcgaccgcctgctgactggcgcattccagcaccagatccggcgtcccaccgcattgcagcggatcggtaagcggcgtcaccgcttgaccaaactgcaggcagatcgctgcgtgatgcgattcgcgcgccacgatccactccaccctcacctgcggcggcaggcgttcaatcaccgcctgggccatcgcgccatagccaattaacatgacctttttcatcatctttccttacagatggcgacagaaaccgccggaaacgtccagcgccgcgccggtggtaaaggaggccagcggcgaagcgaggaatagcagcgcttgcgctggctcctgcggcttaccgagacgcgccatcgggatcccccgcttacgggcgatatcggcggtccactgctgccaactctggctcttatcgcttcggctctcaaaacggcgctgccactgcccggactccaccatccccagcagaatggaattcacacgaatacctttatccaccagctctttcgacagagtcagcgtcatattgagcagcgcggcgcgggcggcagaggtggcgatcatgtgctcttccggctgtaacgccagcagcgagttcacacaggtaatcgaggcgatatccgacgcctctagcagggactgaaaggcctttaccgggttaatcacgccgaacagtttcagttcggcttcgtgcagccaggcctcacgtggcgtatcggcgaagtgggcgacatagccctggccggcgttattaatcagcatatcgacgccgccgaaacgcgcggcgaccgcggcggcgaacgcctcaacttcagcttcgttcagtacgtcacagcgccaggagaacacctcaccttctggatattcgttttgcaacgccgcatgggcgctggcaagccgatccgggttgcggccgcaaaaggcgactttcgccccttcgcccagcagcaggcgcagcgtttcaaagccgattcctgacgaaccgccggtgactaccgcgacgcgcccttcaatttgtgcattcatcgcgcacctcttcccctatgcgtaaaagctgttgattaaaaaagatttcgttatcgagatagctggcatgtccagcctgagggatggcgatgtaaggagcgccgtaacgcagcgccactccctgcactaactccggttgggtaatggcatcctgctcgccacaccacacggagagacgaccgcgatagtcggcgagccaacggtgaatgtcgtcatgggccagcatccaggccgcggcgagataaccgtcgcggcgtagcctgcgcatccccgccgccaccgtcgccacatcggcttcgcgcgcgccagggcgcagcagttttgccgctcgcccctgggccatcgcctcgccgcccagcgctatctgctgttgacgcccctgccagactttttcccgctgtgcggcttccgcctggccgtagccctgcgcgacgtcggcgagcaccaggtaaagcaccctctgcgggtatttcgcggcgaaggcggccgccaccagcgcgcccagcgaatggccgaccagtatggtttgctctactccagcgcggtccagcattcgcgccagcgcgtcggcgtaatcgccggcattcgccggcgccgccgccagcatcgggctttcgccataaccgggcatatcccaggccagcacgcggtagccgggtagcgccatctgtttatgccaggaggccgcgccggaactgatgccgtgcagcagcgtcagcggaataccgcttccttgttcacgaaaccccgtcatcatcgccccttagttacgttttacttttgccagcggatgatcttccgggtaggtcggaatatgcggcttatgggtgccgagcatcacgcacatcagcgcctcttcttcgccgtggttaaacaaaccgcggtaaattccaggcggcaccgagatcagatcgcgttcgcgcagcacggtttcggtatagttgtcgccgtcctgaatcatcagagtgatctgccctttgagcatgaagaacacctcttctacgtcatcatgcaggtgcagcgggccttcacatttggacggcaacaccatggtggaaaaggtgaagtgctcggccggaacggtgttggtatcactggcgacgccggtggcgccggtgccgatgtagcgcatctgcgcgcggcgatatttcggatcgaaatcggcctggaatttcagcgcattccagtcatatttgcggccttcaaagcgcgcgatacgcgactccacccactcttccatcgtcaaatggtcaggtttcaaactctgttttgcagttacggttgaatcagtcatcgttttatcctcagtagcgtctcagcagcggcagtaacagggcgcagcccaccgccgccatcaccgccagaaaaatcagcccggaatccatgctatgggtgaaggcgataagcgcgcccatcaccgccggcgatagcgccccggcaaagtttcccagcccgttgaaaattccacccgccgtggcgctgacccgtggatgggtcgctttagccagcagcgcgaaaatgtttggcgcgccggtgccccacataaaggtgctaaagctcatcgccgcgattaccggcagcggcgtggtgaaatgcatcactgccgccaggccaatacccgcgcctgccagggaaataaagcaggcggcggcgcgcctatcgacgcggtcggacagccaggcgccgataatttcgcctagcaacatggcgataaatggcatcgacgacagccagccggcgtgttccagatgaatgcctttgcctttaatcaggtagcccggcagccagccgttgatcccccacagataggcgagaaaggcgatgttgaagatgcagatcatccaaaaatgcggactcacaaagagctcgagacgcgcgctgcggcgcgcttcctgcgaggttttatctctgctcgctctcgcctccagttgtacgccgcgcagcccgatgcgtacaaaaatcagcaccggtatcgtcagcatcgccatcacgaaaaatgtgctctgccagccgaaggtattgagtagccaaattgacagcgggaaacccagcgccgcgccaaccggcgtgccgagcagccacagcatggtggcgcgggcctgtagccgctgcgggaaggtgtggcgcaccacggtgaacgccaacggaaacagcggcccttcagcaatgcccaacaggatgcgcagcgtcaccatcagcgcgtagttgtgggtgaagcccatgatcaccatcaggatgcaccacaccaccatcattccagtcagcagacgcagcggcgcaatccggtcgccaaggccgcttaataacactgacgagaagccgtaactcagcaaaaaggcactcatcagaatgcccaaccgggtggtgtcgaaatcgatgcccatcgcctgctggaagtgactatcggaaaacagcgcggcgatactgattttgtcgaaaaaagccagcagcacgcaggccagcagcgacagcggaatggcccaacgaactgctttttcaggcgtgcggacgccctcaccgctcgcctctgcaggcgcggcgttggtctctaatgtggtcatttctcccccttaagggttcgcgtttcttatcgcaatgacatcagcgagaaagttgggtcagcgagcgggacgttagagagatcccttcccgccgccatccagcgcttcgccagcttcacgatacgtgcattattgaaggccaccagctgagttaagcgtccatcggcattcagggagaagtagatcgcgccctgcggctcgtcacgcacaatggtccggctgcccgcttgcgggatcccgaggatctggatattgcgatcgtattgatctgaccacagccacggcgcctcgtcgtagccgctggcctgtggatcgagcatcgctttcgctgtcgcgatggcctgattttgcgcaaaggcccacgactgaatgcacagaccgtactgatggtgctgggcgacatccccagcggcgaaaatcgccggatcgttactgcgcccttgggcattaacgacaatcccgcgatcgacagtgagcccggcatcgcgcgccagttcgagattcagatcgacgccgatccccaccactaccgcatcgaaggtttcccgctggccgtcgcagtgcagcgtcggcaagccgttatcatcttccagctccagcgcgccgcagccgcggcgaatatcaacgccctgcccgcgatgcaactcatccagcgcctgcgagacctccatactgaccgagcgcatgcacagcgccggctgctgttcataaagggtcacggctacgccgcttttgcgcgccgaggcggcgatttcgaggccaatccagccgccgccgacgatcgccagccgcgttgccgatgccaaccgctgcttcagacgctgcgcgtcctgccagtggcgcagggtatatacctgaggatgctgcccccaggcctcggacggcagccgcgcgcggccgccggtggcgatcagcagtaggtcgtacgccagcgtttcgccgttgctcagcgccagggttttattttgccggtcgatcgatttcgcgcgcagcgggcggtaccagcgcagatccagtgcctgctgcacctcggcgctgaataaccgcggcagcgccggttcggcctccagcaatgccgctttcgacagcggcgggcgctcgtaaaaatcccattgctcttcggcaaccacgcaaatctcgccgctaaacccttcatcacgcagcgttttcgccgcccagccgccagcctggccaccgccgataatgactatccgcgccgtcataccgcctccggttttttctgctggcgacgggtatcgtgatcgataccgccttccaccgcccattcggtaaaggacacgagtgaatgctcaagctcgcgcggctgccagttttccgtcagatagtcatcgttggtgtagtactcaaaagcgccgccggtcgggctgttgacataccagaagtaggccgaggagaccggatggcggccgggaccgataaacgtgctccacgcgtttttattcatcgcaatgccgccgccgatcacttcatgaatatcccgtacggtaaacgcgacgtggtttagcccgcgcttgcggttgggcaactgcaataagaagaggttatggtgtccgccgcgcacgccgcagcgcaggaacaccgcgcgattgatgtagcggtctgacacctgaaagccgagtacttcgcgatagaaactttccaccgccgccagttcttccacgaagaacaccacgtggccgacgttaatgggctgcgcgcggtcgtagaccgggctcggggtgtcgatgcgacgcacatcgccccactggttgatcggttcaacgttcagttcaaccgccgtttgctggctaacctgcacccgcagcgtcataccgttgggatcgcggcactccagcgcgccgtcgatttcacggaaagcgggctggcgttccagcttcgggcgcagcgcatccagcgccgcccgatccgccacgccccaggtcatgcgacgcagggtgttgcccgcctcaaaggctggcggtaagttggcggcatcggtcgggttaagttcgacccgcgcgccgctgagggtggtaaacgcgcggccgctggcgtcgccggtcaggccaaaatcgcgcatgaatttagcgctgtggttcaggtcgtctacgccaaattccagcttttcaattccggtaatactcattattcgtcgcctctttaccgttcagtcgcccgaatttgggcgtaaaacatgcccgacgcaatcaagcgcctgctgttaagttgttgatttaacttgcctgtgacaaatatccgaggaagccggaaattttgtccgccgccatactgacgtcgttctgcaaccgttcgcgatcgctttgcgggatctcgtccgacggcaccagaatgctgacgaccgccgccacccggccgctgcggttaaagaccggatagacaatcgatgagatgccgtggcgatagaacgattcgccaatcacgtagccgcgggctttatcctgctgcaccatctgccacagcgcttcgcggtcgtacagctggcccggcgtattgcccggcagacgttcattcgggaacaattgttcaaactcgctgcgggaaacatcggtcagcagcatgcggccaagcgaggtgcagtgcaccggtagccgcgttccgacgctgacctggttgatacgcgaaccggcggcgctgacgcgggcgatgtagataatgtcgcggccgtcgcggatcgccagatggctgctgcactggctgatatcgcgcagttgctcgatgaccggctgacccacctgagcgacatccagtgaggcgatatattcaaagcccagacgcagtacgttcatgcccagcgaaaaggtattggtgcgggcgttgcgctcgagaaagcccatatattccagcgtctgcaccacgcgataggcggtcgctttcggcatatccaccagccgatgcagctcggcaaaagtcagatcgcgatgctgttcgccaaacgccagcagcagttgtaaaccgcgctccagacccggtaccaggtacttcacttcctgatcgttcgccataccgcctcacttgttagttaaagacaaaaccgccgttgaccgggatcagttggccggtgataaagcgcgaaagatcgctcagcagccagaccacgctgccggtgacatcttccggctgctgcgcgccgctgagcgcgcggccgttctcatacagctgatgacgctcggcgggaacgtattccgtggcctcaacgcgggtcagtcccggcgcgatggcgttgatacggatccgcttttcacccagctcgcgggccatggagcgggtcatcgcaatcaccgcgcccttactggcgacataggccatcagccgcggcgcgccccacagcgcggtatccgaagcgacgttgacgatcgccgccccttcgcgcagcagcggtaccgccgcgcgggtcaccaaccaggtgcctttaacgttgaccgtcattacccgatcccacagatccggatcgtaatcgatcatattttttccgccgacgccggtggccatcgctgcgttattgactaagccatcgatagacccctgcgcgccgatggcgctgaagacctgctcgatcgatgcttgactggcaagatcgatggcgtgagattcgacctgatagcccttctgctgcaggcgatgagcgctttccgccagctctccctgcaggatgtcgcacatcaccaccgtcgcgccctgagcggcgcaggcttcggcaaagtggtacccgagaccgcgcgccgcaccggtgacgacaatacgtttaccgtttagcaggccgttcatcaggcggcaccctgctgcgcttcgcggagcgctaactgctctttcgccgctttctgcatcatgcggcgcaggcgggacagaccgacgtcatgttgataaaggtattcatgatcgcgggcgttcggcgccaggctttccagcaccacgcgatcctgctccagtacttcccagtgcagtttttccagacggttgcggtacataaagcgccacagatcgcgctgccagccctgaacgccgcggatgcgccagaagaagacgcgacagttatcgttatcttccggaaccaccatgccgacgatccagaagtggccgcccggcccgaaacgctttttgtacggaatagacagacgcatccagtaggcgccgctgttgcccagttcaacccagtcaaagttaacgccgctctgcccttttttctcgaagataaatccggttttcgtcggctgcaggaccatatcggctttgcgatcgccttctgccatcgagtgcgatgatgagtgcaaataggtgccatgcatcgggtccatcacgttttccagcgcgtactggtagttgcatttccacgccgcggtgcacaggaagttactgtatttttcgctatcggctagttcctcagggaagctcaattcatcaggctgctgatcggcggtgacgccaaaccacaggaagattgccccgtgcgcttcgtgcacgctgtagctgcgcacgcactgctggccgaccagcgggcagcgatccaccgccggaacgtctttcacttcgccgttgccggcgacttccacgccgtggtaccagcaggcgatacgatcgcctaagttccagcccattgacaggcgtgcgccgcgatgcgggcagcggtcttccagggcctgcacctggccatctttattccgccagaccacgatctgctcgccgagacgggtaatgcctaccggcgcagactgcacttcccagctcgccagcaccggataccacaggccgcgcagtcctttatcaagatagttttgtaccgttgtcgtcatcgctgtgtcctcagtagccgttaacctgtaaaaatgcctggaagctgctttcgctccacggttcgccctgttggtcatgcatcctgacgccattgaggccgttcaccagttcaccgagactttccgcgccctgctcgaacaacgtttccagggtggcgataagctgcagttcccagttttccggtacccggctgcgggtttgccaaatcagattgtgatagtcgccaggcttatggatattgccgtttccgccttccgccggtggcgtaaactggcggctttccggtagcgccgggttgaagtccagggattcgctcatgccacgttctcctcgataaaggtaatctggatctgattgtcgtatacccgcaccgggtaacgattaaggttgcgaccgccgggtccatgcaggcactggccggttttgacgtcgaataccgcctcatgcagcgggcattccaccttgccatcttcgacaaagccctggctcaggagcgcataggcatgagggcaaacgtcttccagcgcgtaatattcgccatcaatcagataaataccgatttccttaccgtcgatattgccgctatatgggaaatcttcctgtacttgctccgcgtcacatacgcctatccagctcatcgcaatcctccaggcttttgtttcatatatgaaactctgtttcttatttaatacggtcaatataaaagcggtgaatgtttcgtcaagcattaatgtgacgaatttgttaatgagtggcttttaaattagctaagtgtgcaattgatcacgaaaaactgcattcagatgaaatgatgatatttaaagcggtgatccattataaataaaaatgccgatttaaatttcacatacgactattgacttcttttcaaatcgatcattaaaaatgggcaacagcggaaaccatggtgtttcacccatgaaacagctatttatttaatcatttaaaaacaatgagtttcataggtgaaccattttactcatgtaactatttctggcgttaaaaaataataactggcaatcattaaattaagcgtggagacaacgaatggcggcaagatggcaagggataatagcattacttttgttaataattatttcctacgtcgatcgggtaaatatctcggtgatgatccttaacccggaattcgctgcccattttcagttaaatgaaaacagaatgttacaaggtatgctaatgacatgctttcttctgggttatggtttttcggcattattattaaccccagttatagaaagtagatggcattatcgtcagggactcttaagcagcattgctatatgggcgctggtgtgcgccatttccccgctactcggctcactgctgggaatgttgatcgcgcgcatcgttcttggcgtggcggaggggccgctgttctctctgaaaacgcgctttatcaacgacaacttcgccgctgatgaaataggcaagccgaatgcgctgaccgcccttggcgtatcgttggggctggcggtaggcttcccgctggtcacctggctgatggtgcacgttggctggatcggctccttctacgcgctggcgctgcttaacctgctgctcggcggcggattaatctggcggtttctccccgcgccacaagtaacctcacagcgcgcgaagccgggtttcaggcagactttcgccctcgcctggcgtacgccgctgctaggctggatcctgctggtagaaatcgccacgctcagctatctgtgggggagtagcgcctggttgcccgcctggctgcgcgacgagcaccacttctcgctacaggctaccggcctgctggcggctgtcccctttctgttaagcctcggctcaaagtttcttggcggcgtgctcctcgacaaaatgcgcccggagcaggcgccgctgctgtttattatcggcggcctactcaccgccggttctgtgctggcgctgatgctcagccagcagccggcgatgctggcgctgtttatgctggcggcgaacgttttctggggattacagggggcagcgatccccgcggtggttcagcatcacgccccgcgcgaagcggtgggcagcgcctatgggatcattaacggcattggcaatatttgcgcggcgtttattccgctgctgatgggagtggtgatgaaatcggtgggatcggtcagttcaggtttttccgttctggtggcatcgcagctgatcacgctgtgcgccggcggcgcactgctgctgcgtatgcgtcgcgcagcagcagtaaacgcgtctataccctaaataagttgcaggacaaaacggctagtcgttttgaacagcgcttgcgctggccccgtaaggacgaggcccagggatgggccgatttattgccaacgcctatgcaacttgaagtatgacgggaacagatttattcgccctttttcgccgcctggatgtacagcatctccagcgccagggtcgccgccgccagagcggtaatttcggactgatcgtaggccggggcgacttccaccacgtccatcccgacgatgttcaggtccttcaggccgcgcaccagcttgatcgcgcggtcggaggtcagcccaccgataaccggggtaccggtgcctggcgcaaacgccggatccagacagtcgatatcaaaggtcaggtacaccggcatgtcgccgacgatctgcttcacctgggcaatcacgtcatcaacgctgcggtcgttaacctggccggcgtccagtaccgtaaagccattgtctttgtcgaactcggtgcggatcccgatctgtacggagtggttcggatcgataagcccttcgttcggcgcggtatagaacatggtgccgtggtcgaactcgcagccgttggcgtaggtatcggtgtgagcatcgaagtgcaccagcgccattttaccaaagtgcttggcatgggcgcgcagcagcggcagggtaacgaagtggtcgccgccaaaggagagcatacgtttgccggccgccagcagcttctcggcgtgagcctgcagcttctcgctcatttcgcgcgcgtcgccgaaggcgtacaccagatccccgcagtccaccacgttcaggcgctcgcgcatatcgaagttccacgggaaacggttgtgctcccaggcaaggttagtggaaacctgacggatcgccgccgggccatgacggccgcccgcgcgcccggaggtcgccatatcgaacggcacgccggtgatgacccagtccgcatcgctttcatacggcataaagttcattggcaaacgcagaaagccaaaggcattggataccagggagttatcgtattgatgacctaaagtgctcatggatatgacctcttttgacagtcgtggaacgtaaaaaataagtataaaaaaacccctccgcgtcgttaggcccgacgaggaagggtttgatagataaatcgcttattggcgtgaattatcgccggtaatgcatacgggttcaagtgagtatcgcatgctgccggatgacggcttcgccttatccggccgacatacgcaggcccggtcagcgcagcgccaccgggcatcagcggctactcgtcttccagataagtatagccgtacagtcccgcctcgaactcctcgaggaactgctgctgcagcgcatcgtccagaccggtatttttcacctgatcgcggaactgggtcagcagcgtattcggatccagctgcacatactgcagcatatccgccacggtatcgccctcgtcggacagctcaacctcaacgctgccgtcagggaagacgaacacgtccaccgcctcggtatcgccgaacaggttatgcatgttgccgaggatctcctgataggcgccaaccatgaagaagcccagcatcggcgggttctccgggtcgtattccggcatcggcatggtggtggcgatcccgtcgccgtccacgtagtgatcgatggcgccatcggaatcgcaggtgatgtccagcagcaccgcgcggcgctcaggcgacttgttcagcccttccagcggcatcaccgggaacagctgatcgatcccccaggcatccggcatcgactggaacaacgagaagttgacgtagattttatccgccattcgctcctgcagctcatcgatgatgggacgatgggcgcggttgctcgggtcgagctgcttctgcacctcatggcacatgttcagatacagctgttccgcccacgcgcgctcctgcaggttgaaggtgcctgaggagtagccgatgtggatatcgtgcaggtccatctggctgtcgtgcagccattcgcgcagcgagcggcggttgccggtctcgtgcatctccagccaggtttcccacatgctctgcagcggacgcgcagcgtcttccgccggcggggtcgcctcggtgtattcgttacgctccacgccgatgatgttggaaaccagcacggtatggtgcgcggtcaccgcgcggccggactcggtgatcaccgtcgggtgcggcaggccattctcttcgcaggcatcgccgatcgcccagatgatattgttggcgtattcgttcagaccgtagttcaccgagcaatcggactgcgagcgggtgccttcatagtccacgcccaggccgccgccgacgtcgaagcactgaatattgacgcccagcttatgcagttcgacgtagaaacgcgccgattcacgcacgccggtggcgatatcgcgaatgttagccatctgcgaaccgaggtggaagtgcagcagttgcaggctctcaagatggcctgcctcgcgcagaatttcgaccagttgcagcacctgggtcgctgcgaggccgaacttggacttctcgccgccggaggactgccatttaccggagccctgcgaggccagacgcgcacgtacgccaaggcgcggcaccacgttcaggcgctcggcctcttccagtacgatagcgatctcggacatcttctcaatgaccagatagaccttgtggcccatcttctcgcccaccagcgccagacggatatattcgcggtctttataaccattacagacgatgacgctgcgggtcatcccggcgtgcgccagcacggccatcagttccgctttcgaaccggcttccaggcccagcggctcgccggaatggatcagcgattcaatcacgcgacggtgctggttaaccttgatcgggtagacgaggaagtaatcgccgttatagccatacgattcacgcgcgcgtttgaaggcggcgttgatcgagcgcaggcggtgctgcaggatctgcgggaagcagaacagcgccggcaagcgctgcccttgcgcttcacgcgctttgactaattccgcgaggtcaacgcgcgcttccgggacgtccggatccgggcaaacgctgatgtggcccagttcgttgacgtcataatagttattgccccaccaggcaatattataagtacgcagcatcttgctggcttcctgggagctcatcgctacctcctgcatggaacgtagtacaccgtgttcgcctgctgacgaaggcgaaaccatagacatgtcgtcagacatagcgaacctcaatttttaataataagtgtaagacagttaactactatcgcagtccaaagatgcgataacaacccatgaacagtcctaaagcccagcactatctgctggttttgcgactgcgcgaccggtttcttattcatatcatcgtaaaacacgtagccgaacagagtatgacagtccggagaaaccacgagaaaactcttgccaggcaagagcgcccttgttcagttttctgacggccgaccggccctggaatcctgagaagcgccgagatggggtgaacatcggctggtttgcatgagagagatgcaggttgcggagtgctgacgcgcgacagaacgacgcgacgaatcaaacgaaaaacattggttcattatctggtatcacctccacaccgccctgcgacagggtcggcgacaagccaaagctatacataccgggcaacaggcgctacgccgctgcgagattctgtaaatacagactgcttaacccggctggaagtggcaccacagggccatgccccgtgcgcttttttaatgagccgcgcgcggcgttttataccgagaagcggggtaaaaagcaaaataaaaatgtgcctgtttgcgcggttgtcaggaaattttgccaggcgggttttcccataaatgcgaccgccatcaaaaaaggctggaaatgggctcaagatttgacctaaaatggccgtccagaagttaatccgtctatactgattaacactcagactgctcgtgtcgctacctgcgcggctttgcgctgattatccaccaaagccacattacacaacagtatgagctatccgaatcgtccacaggtgaaataaaatatggcaaaacacctttttacgtctgagtccgtatcagaagggcatcctgacaaaattgctgaccaaatctccgatgccgtgctggatgcgatcctcgagcaggatccgaaagcgcgtgtcgcatgtgaaacctatgtcaaaaccggcatggtgctggtaggcggcgaaatcaccaccagcgcatgggttgatatcgaagagatcacccgcaacaccgtccgcgaaattggctacgtgcattccgatatgggctttgacgccaactcgtgcgccgtactgagcgccattggtaaacagtctccggacattaaccagggcgttgaccgtgccgatccgctggaacagggcgccggcgaccaggggctgatgtttggctacgccactaacgaaaccgacgtgctgatgccggcgccggtgacttacgctcaccgtctggtgcagcgtcaggctgaagtgcgtaaaaacggcaccctgccgtggctgcgcccggatgcgaaaagccaggtgaccttccagtatgacgacggcaaaatcgtcggcatcgacgcggtcgttctgtcgactcagcacgcggaagatatcgatcagaaatccctgcaggaagcagtgatggaagagatcatcaagccgattctgccgaccgaatggctcaacgcgtccaccaaattcttcatcaacccgaccggccgtttcgttattggcggcccgatgggcgactgcggtctgaccggtcgtaagatcatcgttgatacctacggcggcatggctcgccacggcggcggcgcgttctccggtaaagatccatctaaagttgaccgttccgcagcctacgcggcgcgctatgtggcgaagaacatcgttgccgcaggcctggccgatcgttgcgaaattcaggtttcctacgctatcggcgttgcagaaccgacgtccatcatggtggaaacctttggcaccgagaaagtgccttctgaacagctgaccctgctggtgcgcgagttcttcgacctgcgtccatacggtctgattcagatgctggatctgctgcacccgatctacaaagaaaccgcagcctacggtcactttggtcgcgaacatttcccatgggaaaaaaccgacaaagcggcgctgctgcgggaagcggccggtctgaaataatctccgcgcttcctctcttcaaggccagcctcgcgctggcctttttatttacgcctcccccccccttttctgcgcccccatttcaacgcgcggccgccaaaaaatgaaagcgattacatagtaaagactgtcaccttctgcccaaagacgctatctcctgtacccatttttcacaatgttacatattgtttcggtcaactctgattaccgtttttcaaaatgtcgtctatccttgtttatattgctgatttaaaaagcatttaatgaattacgtttctttacctttgtggaaacgattacacagccgtgattatagtcacgtttttttaccgacgagtgtcctaccctaaccatcgacagaatcaataactcaactggagggcgttatgcctgacaacaaaaaacaagggcgttcgaacaagactatgacgttcttcgtctgtttcctcgccgcgctggctggcctgctgttcggccttgatatcggtgttattgcgggtgccttaccctttattgccaatgagttccagatttccgcccacacccaggagtgggtggtcagctccatgatgttcggggctgccgtcggcgcggtcggcagcggctggctctctttcaaactgggccggaaaaagagcctgatgatcggcgccatcctcttcgtcgccggttcgctgttctctgccgccgcgccaaacgtcgagatcctgctggtttcccgtgtgctgctcggcctggcggtgggcgtcgcctcatatacggctccgctgtatctgtcggaaatcgccccagaaaaaattcgcggcagtatgatttccatgtaccagctgatgatcaccatcgggatccttggcgcctatctctctgacaccgctttcagctacagcggcgcatggcgctggatgctcggggttatcatcattccggcggtattgctgctgatcggcgttatcttcctgccggacagcccgcgctggttcgccgccaaacgtcgctttgtcgatgcggaacgcgtgctgctgcgcctgcgcgataccagcgccgaagcgaaacgcgagctcgatgaaatccgtgaaagcctgaaggtaaaacagtccggctggtcgctgtttaaagacaacagcaacttccgccgcgcggtgttcctcggcatcctgctgcaggtgatgcaacagttcaccgggatgaacgtcatcatgtactacgcgccgaagatctttgagctggcgggttatgccaacaccactgagcaaatgtgggggacagtgatcgtcggtctgactaacgtgctggccacctttatcgccatcggtctggtcgaccgctggggccgtaaaccgacgctgatccttggctttatcgtgatggccgcgggaatgggcgtcctgggtaccatgatgcacatcggcattcactcctctaccgcccagtacatcgccgtcctgatgctgctgatgttcatcgtcggtttcgccatgagcgccggcccactgatttgggtactgtgctccgaaatccagccgctgaaaggccgcgacttcggtatcacctgctccacagcgaccaactggattgccaacatgattgtcggcgccaccttcctgaccatgctcaactcgctgggcagcgccaataccttctgggtgtacggcggtctgaacgtgctgtttatcctgctgacgctgtggctgatcccggaaaccaaaaacgtctcgctggaacatattgaacgtaacctgatgcagggtcgtccactacgcgagatcggcgcccgcgattaaccttcctgagcttcctcccatcccgggaggaagcttcctcttgctctcccccctcggccgcactatcctctggcgctatgaaaacgccccgtattcccatcgctattcagcaggccgtcatgcgcagcctgcgggagcatctcgccaatgcgaatcgcaagctggaacgccgctatgcggaaccgacgctggtctaccagcagcgtggtacttccgccggcaccgcctggctggagaaaaacgaaattcgtttaaacccggtgctgctgctggaaaatcagcgggagtttatcgatgaagtggtgccgcatgagctggcgcacctgctggtctggcagcatttcggccgcgtcgcgccgcacgggaaagagtggaaatggatgatggagagcgtccttggcgttcccgcgcgtcgcacccaccgctttgaactcgcttcggtccgccagaacaccttcccctatcgctgtcgctgtcagcagcaccagctcaccgtccgtcgccataaccgggtggttcgcggcgaggccacctaccgctgcgttcgctgcggcgatctgctggtggctgaaaaataaccatcggaattaattagaaactttctgatctgactgattgcatccggcaccctcattcgctacgttgcgggctcgttttgacacggagttaacgatgtcccgtatgcatgttttagccgtagcggtattgagcgcggcagtcagtggtccgcttgcggccgctggtattaatagtttttcccaggccaaagccgctggcgtcaaagtgaatgccgacgttccgggcgatttttattgcggctgtaaaatcgactggcaggggaaaaaaggcgttatcgatttggaatcctgcggctataaagtgcgtaaaaatgagaaccgcgccagccgggttgaatgggagcacgtagtgccggcatggcagttcggccatcagcgtcagtgctggcaggagggtggacgtaaaaactgcgccaaagatccggaataccgcaagatggaaagcgacatgcacaacctgcagccggcggtgggagaagtgaatggcgatcgcggcaactttatgtacagtcagtggaacggcggtgaaggccagtacggccagtgcaccatgaaggtcgattttaaagataaaatcgccgagccccctgcccgcgctcgcggcgccatcgcccgcacctacttctatatgcgcgaccgctatcagctgaatctttcccgccagcaaactcagctgtttaccgcctggaataaacagtacccggtcaccgcctgggaatgtgaacgcgatgagcgcatcgcgaaagtgcagggcaaccataatccgtatgtccagcaggcttgccaggcgcaaaagagctaacctacactagcggcaattgttaatttgcagccctgtgcttcccgcccgatggcgggaagctggcatctgcgcaacgaacggaatatcaagcatgcgcattcctcgcatccatcatccagaacgcctcattgtcggcagccagatcgcgctgagcgatgacgcggccaaccacgtcggccgcgtcctgcgcatgaccgccggtcagcacctacagctttttgacggcagtaaccaggtgtttgacgcggtcatcaccgaggccggtaagaaaaacgttacggctgaggtgctcagtggcgaacctgacgatcgggaatcgccgctgcatatccatttaggccaggtgatgtcccgcggcgaaaaaatggaattcaccatccagaaatcgatcgaactcggggtaagcctcataacgccactgttttccgagcgctgcggcgttaaactggatgccgaacgtttgcagaaaaagatccagcagtggcagaaaatcgctattgccgcctgcgaacagagcggtcgtaacgtggtaccggaaatacgtccggcgatgcagctggaggcgtggtgcgccgagcaggacagcgggctgaagctcaacctgcacccgcgcgccagcgccagcattaacacgctgccgctgccggttgaacgcgtccgtctgctgattggcccggaaggcgggctgtcggctgaagagatagcgatgaccgcgcaataccagtttactgatatcctgttgggaccgcgcgttctgcgtacagagactactgcgctcaccgccatcaccgccctacaggtgcgttttggcgacttaggttgaggcgttaacggagaagaaccatgatcaagctcggcatcgtgatggatcccatcgcaaccatcaacatcaagaaagacaccagcttcgctatgttgctggaggcgcagcgtcgcggctatgaactccattatatggagatgaacgacctctatttgatcaacggcgaagcccgcgcccggacgcgcacgctgagcgtcgaacagaactacgataaatggtatgacttcaccggcgagcaggatctgccgctggcggaccttgacgtcatcctgatgcgtaaggatccgccgtttgataccgaatttatttatgccacctacatcctggagcgggcggaagagaaaggcacgcttatcgtcaacaagccgcagagtctgcgcgactgtaacgagaagctgttcaccgcctggttctctgaactgactccggaaacgttggtcacccgcaataaagcccagctgaaagccttctgggaaaagcacggcgatatcatcatgaaaccgctcgacggcatgggcggcgcctctattttccgtgttaaagccggcgatccaaaccttggggtaattgccgagacgctgaccgaactgggcagccgctactgcatggcgcagaactatctgccggccattaaagatggcgacaagcgcgtgttggtagtggatggagagcccgtgccttactgcctggcgcgaattccgcagggtggcgagacccgcggcaatctggccgccggcggccgcggcgaagcccgcccgttgaccgaaagcgactgggaaatcgcccgccgcgtcggcccgacgctgaaggccaaaggccttatcttcgtcggcctggatatcatcggcgaccgtctgacggaaattaacgtcaccagccccacctgcgtacgcgaaatcgaagccgccttcccggatatttcgatcaccggtatgctgatggacgctatcgaaagacgtatcgataaataagcacgacggcggaccaacgtccgcttttggcgcagcgagcgcggattaccgcgctcgtgaaacgttgccagcctgacgccactcgggcgccagccagataaagtgcatcgacaccattctactttgcccgcatactgggtgttgcttttttgaaccaggaacgaacctctgacaatgaatttacagcatcactttctgattgccatgcccgcgcttcaggaccccattttccgccgctccgtagtctatatctgcgagtacaacgacgagggtgccatgggcattattatcaataagccgctggaaaatctgcaggtggaagggatccttgagaagctcaaaattgtcccggagccgcgcaatccagagatccgtctggataaaccggtgatgctgggaggcccgctggcggaagaccgcggcttcattttgcataccccgccctctgacttttcctcgagcattcgcatctcggataacacggtgattaccacctcgcgggatgttcttgaaaccttaggtaccgatcggcagccgggcaacgtgctggttgcgttgggctactcttcgtgggagaaagggcagctggagcaggagattttagataatgcctggctcaccgccccggcggatcagaatattcttttccgtacgccgatcgccgatcgctggcgcgaggcggctaaactgattggtatcgacattgtgacgatgccaggcgtcgcggggcatgcgtgatgagcggaacctttctcggctttgactttggcaccaaaagcatcggcgtggcggtgggacaacgcatcaccgcgaccgcacgaccattaccggcgctgaaggcgcaggatggtaaaccggactggaacgtcatcgaaaaattgcttaaagagtggcagcctgaggcggtaatcgtcggcctgccgctcaatatggacggcaccgagcaaccgctgacggcgcgcgcgcgtaatttcgccaataaaattcatggccgctttggcgtcgcgatccttctccacgatgaacgactgagtacggttgaggcccgcgcgggcctgtttgaacacggcggctaccgggcgctgaataaaggcagcgtcgattcggcctctgccgtagtcatactggaaagctacttcgagcagagcttttaagctctgccctcctgcgccgccggcggaccgctgacggcgcacgtttacccgcttagtggcgcagatgttcgttagcccagctcaccgcctgggtgcgatttttcacgctcagtttacgaaacacattgtacaggtgcgtccgcaccgtgttctcgctgataaacagcgcgcgggcgatatccaggttcgttgcgccgcagcgcagttcgttgaggatctcgcattcccgctcggtcagcggcgagttctctactggagtcgatgcatggtccgcagcgtacatcgccgggtgcatcacgctcaattcagccgtctgctcgccgttcagtacggccttaacgccctcaattaagcgcgattcatcatcgtcatgacggaacacgccatataaagccggccactgcgccatttcgtatagctcatacttttgtgcgctattaataatcaacaaacgaggattatctgcctgcaggcgaataatatcccgccacaccccgtttaatttcttatttgacactgcaatatcaaataatattacagaatcttttgccaaacgctgcgccagcggtttattaatattttgtaaaaccaccggtgccatcagggtttcgctcagatagctggcaaaggctttgctttgaatagacgggtgggtaataaaggttacctgacgagaagatgatgaatttccatttaaattaatcacttaaaactctccttagctgttacccaccgccatggtggttaaatgaataaaaaaagatacaaacagtcgtgaatttataaatcaccaaggtaatttacaaactgaaacgttattccatgagaatcatcctattcccacaaacagcataaatcgaatgactcaaagctgtcaaaagataatcaaacttttttcctggaaatgcgtattcactgtcgacatatctaatctgaatgtgttatttgaatttataatcaaaagttatttgtattaccaaataatattaataaacaacaaataaacattcatctaacatatcatttaacctgtcatatcaatctcttgctcatcttatagcgcgcctgcagcgacacgttgctgaaaactctgggtaaaggtcaacattccggcctgcatcccggtctgcatcacgccaggcaattgatgtacttttccttcacggatcaaattcgccaccgctggcgtgttgaccagaagctcgtatagcgcaactctcccgccctgacgtgcaggtaacaatttttgcgccagcaccgcgcacaggcttccggcaagctggctacgaacctgatctttctcctccgccggaaagacatcgatcaatctctccaccgccggcgccgcgccgcgggtatgtaatgtcgccattaccaggtgcccggtctccgccgcggttaacgccaggcgaatggtttcgctgtcgcgtagctccccgagcaggatcacatccggatcctggcgcagcgccacgcggagcgccgcggcgaacgaaggacagtgacggccaacttcccgctgctggatcagacagcgctcgctgtgatgaataaattccaccggatcttcaagcgtcagaatatggccatcaagatgctgattgaggtgccccaccattgccgccagggtggtcgacttgccgctgcccgtcgctccggtgaccaacagcaaaccactctcttccgccagcagttcgctcagcgcaggcggggcgccgagcatatccagacgcgggcactgttcaggaaggagacgcagcaccagcgatatcccacgcgtatgggcgaaggcgctggcgcgcagccgcgcaccgcaggccaggttcagcgcaaagtcaatctggccgtgttcctgccagtgcagtaactgtgcggcatcgagccagtcgttgagtaaattcgcaatatccggcgcgggaaagggcgcgggctccagcctgccctgccgccgccagcgcggtgcggcggaattgcacaggtgtagatcggagacattatgctttacactaagggctacgatttcttccagcttcataactcatcctcggaatatgaacgatattgcgcataacctggcacaggtccgggacaaaatctccggtgctgccgcccgatgcgggcgtgcgccagaagaagtgacattgcttgcagtgagtaaaacgaaacctgcgagcgcgatcgaagaagccattgcagcaggccagcgggcatttggtgaaaactacgtccaggagggcgtggagaagattaaccatttccagcaggctggcgtcagcgggctgcagtggcactttattggccccctgcagtccaacaaaagccggttggtggcagagcattttgactggtgccacaccgtcgatcggctgaaaatcgccacccgcctgaacgagcagcgcccggcgcatttaccgccgctgaaggtgctgattcaaattaacatcagcgatgagcagagcaaatccggcatcccgctggaagcgctcgacggcttagcggcggagatcgctgagttacctcatctggaactgcgcggcctgatggccatccccgcgcctgagtcagaatatgtaaggcagtttgccgtcgcccggcaaatggcggtagcatttgcgcgattaaaaacgcggtaccccacggtcgatacgttgtctctgggaatgtcggacgatatggaagccgcaatcgcggcgggaagcacgatggtgcgcatcggtacagccatttttggtgcgcgcgactacagcaaataataaggaatctgaggaacgccatgaagacgttgactttcctgctttcaacggtcattgagctttacacgatggtcgtgttgttacgcgtctggatgcagtgggcgcgctgcgacttttacaacccgttttcgcagtttgtggtgaaagccacgcagccgattgtcggaccgctgcgccggattatcccggcaatggggccgattgacagcgcctcgctgctggtggcatttattctatgcgtcatcaaagcgatcgtgctgtttatggtgatcaccttccagccgatcatctggatctccgctctgcttattctgctgaaaaccatcggctcgttgatcttctgggtactgctattgatggcgatcatgagctgggtcagccagggccgtagcccggtggagtatgtgctgatgcagctggcggacccgctgctgcgccctatccgcaacctgctgccgtcgatgggcggtatcgatttctcgccgatggtgctggtactgctgttgtacgtaatcaatatgggcatcgccgaagtgctgcaggccaccggtaatatactgctgccggggctgtggatggcgctatgagtgccgttgaaacctgcgctgacgggctggtgctgaggctgtacattcagcctaaggccagccgcgatagcatcgtgggcgtacatggcgacgagcttaaagtcgccattaccgccccgcccgttgatggccaggccaatgcccacctggtgaaatttctcgccaaacagttccgcgtcgccaaaagccaggtactgattgaaaaaggcgagctgggccgccataagcaagttaaaatcatcgccccacaacagatcccgactgcggtcgcggcgctaactgaataaacaggattcatcatgcaaaaagtcgtcctcgctaccggcaacgccggcaaagtgcgcgaactggcctcgctgctggaagattttggtctcgatatcgtcgctcagaccgagctgggcgtggactctgcggaagagaccggcctgaccttcattgaaaacgcgattctgaaagcgcgccacgcggcgcagatcaccggcctgccggccatcgctgacgattccggtctggccgtcgatgctcttggcggcgcgccgggtatttactccgcccgctattccggcgtcgatgccagcgaccagcagaatcttgagaagctgctcgacgcgttaaaggacgtgccggacgatcagcgtcaggcgcagttccactgtgtgctggtctatctgcgccatgccgaagatcccacgccgctggtgtgccacggcagctggcctggggtaatcacccgacaagccgccggtcatggcggcttcggttacgacccgatcttcttcgtcccgtcagaaggtaaaaccgcggccgaactgagccgtgaagaaaagagcgccatttcccatcgcgggcaggcgctgaaactgttactggaagcattacgtaatggctaatttgccgccgctgagtctctatatccatattccctggtgcgtgcagaaatgcccgtactgtgattttaattcgcatgcgctgaaaggcgaggtgccgcatgatgactacgtccagcatctgctgaacgatctgcaggctgatgcgcaatatgcccagggacgggaaataggcactatttttatcggcggcggtacgccgagcctgctgtccggcccggccatgcaaaccctgctcgatggcgtccgcgcctgcctgccgctggccgccggggcggaaatcaccatggaagccaacccgggtaccgtggaggccgatcgcttcgttgattatcagcgcgccggggtgaaccgcatctccatcggcgtacaaagctttagcgaaccgaagctgcagcgcctggggcggatccacggcccggaggaggccaagcgcgcagcacgtctcgccagcggcctcggcttgcgcagcttcaacctcgacctgatgcacggtctgccgaaccagtcgctggaggaggcgctggacgatctgcgtcaggcgattgccctcaacccgccgcatctgtcgtggtaccagctgaccattgagccgaacaccttgttcggctcccggccgccggtgctgccggatgacgacgcgctatgggatattttcgagcaggggcatcagctgctgagcgccgccggctatcagcagtacgagacgtccgcctatgctaagccaggcttccagtgtcagcataatctcaactactggcgctttggcgactacctcggcatcggctgcggcgcgcacggcaagatcaccttccctgacggacgcattctgcggaccgccaaaacccgccacccgcgcgggtatatggaaggccgttaccttgagcgtcagcatgatgtggaagaagcggataaaccgtttgagttctttatgaaccgttttcgcctgctggaggccgcgccgcgcgctgaatttagccgctataccggacttgaggaagcggcgatccgcccgcagctggacgcggcgatagcccagggctacctgcaggaagacgagcagaactggcagattaccgagcacggtaagctgttcctgaattccctgcttgagttgtttctgaacgagtaaacgcagcggcggtcctgccgggaagcggaccgccatggcattatttcagcgagccaaccagcgctttgcggctgtcctccagcgataccacccggctgcagacgtccttaccaaactgctggaaatcggcctcctggtttttccattcctcctgaatcgccgtttgcaggccgccgaggctgccgagaatgccctgtagcggattaccgccgcctttgagcaccgctttcgcccccatctcgttaatgctgtcctgcagaatgccgcccatcgcctgattcaccagctgctggccatcggcgcgtacctggtcgatagctttatagtggaaagtcaggccatcgctgcgacgttcgataatgcggttcatctgttctttcagctgcgcatccagtttggtcaggcgaccgtgcatgctgctgttggcgccaacctgttcggtaatgattttatccagcgccttgcggcttttttcgactcgcgaacgcgcgccttcgtcaatccacggcaggctgctgcgcaggctggcctgataatcctgcgcctgttcgcgctgggcggcgctgagcgcataggccttgccgttaaaggtcagattgccgtccggctttatcaccagatcgccgttttcccctttcacctgcacctgctgcgggctgaggatcacatcgtcacgcggcgtgacgctacactggtagtccgcatgggcagacaaagcggtgacggagagcgccaccgccagcagcgttttacgcatcataaaactcccttaagacaaaacgggccggcaattgccgacccttgtcaaacttagtcccaccagacgtcaaaaagttcgctggtgcgcacatcctctaacttacgcgcttccagccatttgcgtacgatagcctgatgctcttcagtgcacttaccaatctcctgcatgcagatgagcccttcccaggagagataaccgctgccgtcgaaggccagcttgttcggctctatcacctcttcgatcagatcgttgaccgtctggtcgatctgctcttcgctggtcccttccgggaaacgccaggcgacggagaagcctaactcctgaaactcatcgatatgcatttttttacgcagacgacggctacgattcttggccattatttcaccctctcgaacattaagtcccatacgccgtggccgagacgatggccacgctgttcaaatttggttaccgggcgcgattccgggcgcggtacgtaatcgttgcttgccgactggttacgatagccttccagcgaggacataacttccagcatatgcacggcataggcttcccagtcggtcgccatatggaagacgccgccgagcttcaacttgcttttcaccagctcagcgaaaggcggctgcacgatacgacgtttattatgacgcgctttatgccacggatcagggaaaaacagttgcaccatattcagcgagttatccgggatcatggtatgcagcacttccaccgcatcgtgacacattacgcgcaggttttgtacgccttcttcttccgcagaagccagacaagcgccaacgcccggggagtgtacttcaatgccgaggaaattctgttccggtttggctttcgccatcgccaccagcgaggcgcccatcccgaagccaatttctaaggtgaccggcgcgtcacggccaaacagggcggcgaaatcgagcggcgcatcgttgaattcaacgcccatcaccggccaaatgttatccagcgcatgctgctgccctttcgtcaggcggccctggcgacggacgaagctacgaatacggcgcagcgggcgaccgttttcatcgaattccggagagatgacgtcgtttttcataaaagtttggtctgcttgtgaatgtgttcggaaaacgggcattatccaaagttactcggcggatgcaagggtttacagccactcgcccttatgctgcaatctgcccccctgtaatcgcgatcccggagccgtagctttgacttttctcgccacgcaattttcagcccaggttctggactggtacgacaaatacgggcgtaaaaccctgccctggcaaatcgccaagacgccctacaaagtatggctctccgaagtgatgttgcaacaaacccaggtgaccacggtaatcccctattttgaacgctttatggcgcgtttccccacggtggtggatctcgccaacgcgccgctggatgaagtgctgcatctgtggaccggtctgggctactacgcgcgggcgcgcaacttacataaagccgcgcagcaagtcgccacactgcacggcggggaattcccccggacctttgacgaagtggcggcgctgcccggcgtcgggcgctcaacggcgggggcgattttatccctttcgctcggtcagcattatccgattctcgacggcaacgtgaagcgcgtgctcgcccgctgctatgctgtcagcggctggccggggaaaaaagaggtggaaaaacggctgtgggacatcagcgaagaggtcaccccggcagagggcgtcgagcgcttcaaccaggcgatgatggatctcggggcaatggtttgtacccgctcgaagccgaagtgcgagctatgtccgctgagcaacggctgcgtggcctacgcgaaccattcatgggcggaatatccgggcaaaaaaccgaagcagaccctcccggaacgcaccggctacttcctgctgatgcagcacggcgacgaggtgtttctttcccagcgtccgccggtgggtctgtggggcgggttgttctgttttccgcagtttgcagacgaagcggagctacgcgagtggctggcgcagcgccagataaaggccgataatctgacgcaattaaccgcttttcgccacactttcagccatttccacctggatattgtgccgatgtggcttacagtgcactcatctggcgcatgcatggatgaaggcaacgcactctggtataacttagcgcagccgccgtcggtcggtctggcggcccccgtggagcgcttgttgcaacagctaaaagccggagcgccggtataaatttttcggctatcaaagaggattaattatgagcagaaccattttttgtaccttcctgcagcgtgaagcggacggccaggatttccagctgtatccgggcgagctcggaaagcgtatttacaacgaaatctccaaagaagcctgggcgcagtggcagcacaagcagaccatgctgatcaacgagaaaaagctcagcatgatgaacccggagcaccgcaaactgcttgagcaggagatggtgcagttcctgtttgaagggaaagacgtgcacatcgaaggctacacgccgccggaaaaacagtaagggccctgcggcctttaaaaaaacaaacacaacacgcacgcccggaatgatgaaaaaatacttagcgctcgcgctgattgcgccgttgctcgtttcgtgttccagctccaataaaaaaggcgccgaatacaacgaggcctgggtcaaggacacgaacggattcgatattttgatgggccagttcgcccacaacatcgagaacatttgggggtacaacgaagtcctgctcgccgggccaaaggactacgtcaagtacaccgaccagtatcaaacccgcagccacatcaacttcgatgaagggacgatcaccgtcgagaccattgccggcaccgaccctcgcggacgactgcgccaggctatcgtcaaaaccctgttgatgggcgatgaccccaactccattgacctctattccgatgtcgatgacatccagatctccaaagagccgttcctctatggccaggtggtggataacaccggggcgtcgattcgctgggagtggcgcgccgcgcgctttgccgactatctgctgcaaacccgtctgaagagccgcaacaacggcctgcgcgtggtctacagcatcaccattaacctggtgccgaaccacctcgacaaacgtgcgcataaatacctcggcatggtgcgtcaggcctcgcgtaagtatggggttgatgagtcgctgatcctcgcgattatgcagaccgaatcctcctttaacccctatgcggtcagccatgccgacgccatggggctgatgcaggtggtccagcacagcgccggcagagacgtcttccgctcccagggtaaatccggcctgccaagccgcagctatctgtttgacccggcgaataacatcgacaccggtaccgcctacctggcgatgctgaacaatgtttacctcgccggcatcgataaccccacctcgcgtcgctacgcggtgatcactgcctataacggcggcgccggcagcgtactgcgggtcttctccagcgataaagtgcaggcggccaatattatcaacagcatggcgccaggggacgtctaccagacgctgaccacccgccatccgtcggcggaatcgcgccgctatctgtacaaagttaatacggcgcagaaaagctaccgccgtaaatagccctcctcccgactccggcctcagccccgcgctgaggccgcgcttattctccgccatactctgtaatatctttcggttttctgcggcagttaacagaagcattaagctagtgaatgatagaatcgcatcaaaataacgggattaatgttattttaaaaacataacaagcccacattcgtgaggataactacatgaatcttaagctgcagctcaaaatactgtcgttcctgcagttctgcctttgggggagctggctcaccacgcttggctcgtacatgtttgtcacgctgaagtttgacggcgcggcaatcggcgcagtgtatagctcgctcggtatcgccgcggtgttgatgccgacgctgctcggcatcgtcgccgataagtggatcagcgccaaatgggtatacgccatctgccacctggtcggcgcgttaacgctgtacctcgcggcgcaggtcaccacgccgggcgagatgttcctcgtgatcctgcttaactcgctggcctatatgccgacgcttggcttgatcaataccatctcctactaccgcctgcagtcggcggggctggatattgtcaccgatttcccgccaattcgtatctggggcaccatcggctttatcctcgccatgtggggcgtgagcttctccggctttgaactgagccatatgcagctgtacattggcgcgacgctgtcggtcctgctgactctgttcaccctgacgctgccgcatattccggtcgccaacgcccagcgcaatcaaagctggacggagatgctcggcctgaacgcttttgcgctgtttaaaaacaagcgtatggctatcttctttatcttctcgatgatgctcggcgccgagctgcaaatcactaacatgttcggtaacaccttcctgcacagcttcgataaagatccgctgtttgccggcagctttatcgtcgagcacgcgtcagtgctgatgtcgatttcgcagatttccgaaacgctgtttatcctgaccatcccattcttccttagccgctacggcattaagaacgtgatgcttatcagtattgtggcgtggatgctgcgctttggcctgttcgcctttggcgacccgacgccgttcggcactgtactgctggtgctgtcgatgatcgtctacggctgcgccttcgacttctttaacatctccggttcggtgttcgttgagaaagaggtgcgcccggaaatccgcgccagcgctcaggggatgttcctgatgatgaccaacggcttcggctgtattctcggcgggatggtgagcggcaaagtcgtcgaacactttaccgtcgaggggatcactgactggcagagcgtgtggctgattttcgccggctattcgctggtgctggcctttgccttcgtggcgctgttcaaatacaaacacgtcagacaaccgaccgccgcccagcagagcgtgtgatcggcaaaagtaaaacgccccgcctgttcggcggggcgtttttttatcccttcagcacgtagccatacagccgcttaatgccgtccggatccgtctcgctgtaaaccccctgcagctccggcgagaagccaggcagcatattgaccccctcctccagcgcgaggaaatagcgcagcacggcgccgccccagacctcgccgggcaccacgcacagcacgcccggcggatacggcagcgccccctccgccgcgacgcggccttccgcctcgctcagacgcaccagctcaacgttgccgcgaataaactcgtggttggcatcctggggattcatcaccacccttgggaagctccgtttacggaacatctctttttgcaggctcttcacgtcaaagctaacgtacagatcgtgcatctcctggcacagctcgcgcagggtatagtcgcgataacgcaccggatatttgttatagatggtcggcaacacatcggccagcggcgtatccgcttcaatatgctgttcaaactgcccgagcatcgctaccagctgcgccattttttcggcactttccgccggcgtcagcaggaacagaatcgagttgagatcgcacttctccggcacgatgccgttttcacgcagataatgcgccagaatagtcgccggaatgccgaactcactgtactccccactctccgcgtcgatgcccggggtggtcagcagcagcttgcacgggtcgacaaaatactggtcgtccgcgtagccttcaaaaccatgccagcgcgcgtcgggttcgaagctgaagaagcggcgctcccgggcgatcgcctcggtcgggtgatcctgccacgggcgccccgccaccgtcggcggaataaagggctggatcatcttgcagttagcgatgatcgctttgcgcgcctcgatgcccagcgccacacactcggcccacaggcggcggccgctctcaccttcatgaattttggcgttgacgtccagcgcggcaaacagcggatagaacgggctggtggaggcatgcagcataaaggcgttattcagccgcttgtgcggacagaaacgcgcctggccgcgcagatggttatcctttttatggatctgcgacgtctgtgagaagccggcctgctgcttgtgcacggactgggtgacaaaaatacccggatcgtcgggggtcagctccagcagcagcggcgagcagtcggccatcattgggataaactgctcatagcccacccacgccgagtcgaacaggatgtaatcgcagaggtggccgatcttatccaccacctggcgggcgttatagaccgtgccgtcgtaggtccccagctggatcaccgccagacgaaacgggcgggaggcattggctttctcaggcgccgcttcgcggatgagatcccgcaggtaatgctcatcaaagcagcgctcgtcaatgccgccgataaagccgaacggattgcgcgcggcttccaggtaaacaggcgtcgcccccgcctggatcagcgccccgtgatggtttgacttgtggttgttgcgatcgaacagcaccagatcgccgcgggtcaacagcgcgttggtcacgactttgttggccgccgaggtgccgttgaggacgaagtaggttttatccgcgttgaacaccttcgcagcgaacttctgcgcgtgcttggccgatccttcgtggatcagcagatcgcctaatttcacatcggcgttgcacatgtcggcgcgaaagacattttcgccaaaaaagtcatagaactgacggcctgcagggtgctttttgaaaaacgccccgtgctgatgccccggacaggcaaaggtgctgttatccatctcgacgtactgggtcagggtattgaaaaacggcggcagtagacgcgcttcataatcacaggccgccgcctccagctccagccactcctgatctttaccggcgatcaccgcctgcaccccctccggcttgtcgaccgccgtctcactcagcaggtagaccggcaggttaaatccgctacgcctgaggagagtaaggatgccgctgcgactgtcggccacggagatgacgactgccgccacatcggtaaaatcggtactgtccagcgccacaacgcgacggtgggtggacaagcgggtgaccagctcgcagctggcggcaatgtgcatggatttcataagcgcaaatgcccgtatcgggagtgtaaaaatctcagacaagggagaccttgcccaacgatgtgtccgggtctgacggattcagctccgaccgccggacatcagtaaaagcagacgcgtccgatcttactgttgccctacagtgagcatacgtgtccttcaccgcatggtgaacagaggggtaagcgtagcaagatgaggcagcccgcgcatctgggcgcggcgtcgctggcgagataatggctgtgtcgtcatcggcggcctcatatcagggaggagaaaattcgcgcaatcatggcacctttcccgaacaggcgcaagatgaaaaccgtatgcacttatatcacggatacacaagctttcccggtaagttaacgccataataatgcggttatcagggatttttaacaggagtcagcgtggttacaggaccttttattaacgccagcgcggtgctggtcggcggtgtgctgggcgccttactcagccaacggttgccggaacggatccgcaccgcaatgacctctatttttggcctggcgtcattgggcatcggcattttactggtcattaagtgcgccaatctgccggtgatggtgctgtcgaccctggtagggacgctgctcggcgaaatatgcaatatggaaaaaggcatcaatacgctggtcagtaaactccagcagttgatgtcagcgaaaggcaagaaaaaggcttcggctcatgagtcttatattcagagctatgtggcgattatcgtcctgttctgcgccagcggcaccggcgtcttcggcgccatgcgcgaagggatgaccggcgacgccagcattctgattgccaaagcgtttctcgactttttcaccgccaccatcttcgcctgcaccctgggcattgccgtcgccgccatcagcgtaccgatgctgcttatccagctgactcttgcagcctgcgcggcgatcattatgccgcttaccacgccgatgatgctggcggatttcagcgccgtcggcggcatgctgctggtggccaccgggctgcgcatctgcgggataaaaatgtttgccgtagtgaatatgctgcctgcgctggtgctggcgatgccgatttccgcggcctggacgctgttttttgcctgaaaacgcgtgcttttagcgcaatgtggtgatagattgttcagtctgctgcaaaacagataaatttcgttgacgaggcgcggcgattacggtttaatgcgccccgttgcccggatagctcagtcggtagagcaggggattgaaaatccccgtgtccttggttcgattccgagtccgggcaccactatttaaagaacccgcccaaaaggcgggtttttgcttttctgtagccggactctccatcgaactgcgttcgattattcgccgcacagcggctcaccccttcggggccagcgcggcacgcgcgctgttcaacgcctgcggcgttagtccgagtccgggcaccactatttaaagaacccgcccacaaggcgggtttttgcttttctacgaccggactctccatcgaactgcgttcgattattcgccgcacagcggctcaccccttcggggccagcgcggcacgcgcgctgttcaacgcctgcggcgttagtccgagtccgggcaccactatttaaagaacccgcccaaaaggcgggtttttgcttttctacgaccggactctccatcgaactgcgttcgattattcgccgcacagcggctcaccccttcggggccagcgcgacacgcgcgctgttcaacgcctgcggcgttagtccgagtccgggcactcaaataccgataccaccatccggaataccaagtctggcaatacgccttacaagcccagcgacgcgcagtgtctggacctgctgattaaacccaacggctctaagctctggcagctcaagtaccgctttggcgggaaggagaagaagctggcgtttggcgcttacccaaccgttacgctggcgaatgcgcgtaagctgcgtgaggaagcccgcgccgtactcagcgcgggtgacgatccgggggtaaaaaagcagcaggagaagcaggcaaagaaaagcggcaacacctttgaagaaatcgcccgtaaatgggtggcaggcaatatccgctggacggaggcacacgccgctaaagccctgcgctcgctggagctgcacgtatttccactgattggcaaaatccccgttgccgacctgaaaaccgccgatctgctgatcccgctgcgggtggcggagagaaagggcaatctggagaccgccgcgcggctccaacagcgcatcacggcgatcatgcgctacgcggtacaggagagcctgatcgccagcaatccggcaaacgatcttaccggagccatcgcaccgccgccgaaaaaccactaccccgctctgccgctggagaaaatgccggaattactggagtgcttcgagagctattccggcaggctgttaacccgtctggcggtgcagcttaacctgctgatctttattcactccagcgaactgcgctttgcccgctggacggagatcgatctggatggcgcaatgtggaccatccccgccgagcgtgagccgattccgggtgtgcgctattcagagcgtggcgcaaaggtgaaaacgccgcatctggtgccgctgtcaaaacaggcggtcacggtgctgaaacagttaaagctgctgtccggtaacagcgagttgctgtttcccggcgatcacgatccgcgcaagccaatgagcgaaaacaccatcaacaaggcgctgcgggtgatgggctacgatacgaaagtggacgtatgcggtcacggcttccgcacgatggcctgtagcgcgctgatcgagtccgggcgctggtcgaaagatgccgtggagcggcagatgagccatcaggaacgtaacaacgtgcgcgccgcctatatccacaaggcggagcatctcgatgagcgcacgcagatgatgtagtggtggtcggactatctcgacgcctgtcggcagaattttgttgcgccatatcggtatgacaggcaggttcaggtggcctgagccattcagtggatcacgtaggaaagcagatctcagcggatctgcttttttatttgtaccagcttcgtaatccatttctcggcgccagatctccccggataaacaccaatctgcgccagtgccagccctttcagccctttggtctgttctggcctggcgctgttaccgttagcgctcctttaccccttcggccttttgcttttcatgattgcaccagaacaggaaattattcctcttcccgtcgcccgtaaacccgcaccacataccgcccgcgcccgtcgccgtggcccaaatccattgaggtcagcaccagcgcttccctgtgactgaatccctgcgccagatatcggcggagcgcatcctgcgtccatgcataacggaatgactgcaggatataaataccccgtcagcccggtcttcgcgatttctttgcgccagtaatccatcgcttgctggagactgggcttgtcaatcagtctgccgtcacgttgttctgcgacagccagggcattttccagcacttttttcactgcgccagcgtcctgaatggtttcacggggacgatggcctttggtaccaaataccaccgtgaaccggatttcgccgcgctccagcgccaatttccacgttttcagtgactgacagcactgaaccgcttcctacgagttcaatgttgtcaaggccacgagacggtgagcaccgcactagcatgccctatgccgagggcacccgttccgttactgcacaaggaccaggtaaggatggtacccgtgctccctacccctacggttcccaggtcagacggggttcctacgaagtcgaagttgttgacgtcgggtgtgcactgcccggcagggcggtttcctattagaccaaagatattagccatcttgacagtattcgaggcatcctggagagcgagagaatttgaaacgtctccgacggtgccttgcgcggatagggtaactgacacgcgattggtcccactgccaccatcatcgacagaggtgcacgaggtcgtgatagtgctttgctgcacccgcaagagttgcccggatacgacggacgcgtcaatctggccaaattggactgtaggtgtgtctatgttgacggtgcaagaagtgggcaacaccacacgtacagcagacggcaagggaatggagactgtgggaggactcccccacgtattcgcactgaattttgcaaacacaagcggtaccacgttgtacgtcccggcaacggcgttcggacctgcatgaatgaagacgctaccagtgaacgaggatggatacgacattgttacggacgtctgggtcccagacgtggtggtggttggggccgcccaaggacacctggatagcggataggtttgggacgcggtgacaccgttatcagcaagcgtcgcagagccattcacacgtcccgaggtgtactgggtcgagccagtcatcgtgcccgagatccctaacacgaggtccggaccaagtggtatgccgtagaacccgtcgctggtcgtggtcatggcctggtgaaacggtacgcgcatgcaggatccatcgggcggcattacgtcggctcgaacgacgctagccggtgccccgagattatttgtatccaaattggaaccagttgcggtggtcccggggatagtgatgttcaccggaacgcgccaggtagcatccgccccgcctgggcgtatgacctcaatgagggcgtaagagggggcggaggacaggagtcctaccatagccccccaaattttccaccgtgcacggtaatccgacacacgcctggcttgtttcgttttagaccagtgacgtgtctgctcataaagccgacggaccttctcccggtggttggtcagtgcgcgaggggcaatgccgaccacaaccttatccgtgagccacgcgcccagccagtcaaaacctcggctcactttgccaataaacgtcttgtccgggtgtttctcaaaccctaatgacgcaagatatttattgagttgcttcacctgcttacgtaactgccagcggctgtaagttaaaataacaaaatcgtccatataacgtccataatagattttatgttgatgagcaaaataattatccacagcccagagatgcaacgcccccatgagcggacttaacgcgcaaccacgcgcgatacccttttcgggcgtgtaaaactcgccgccctcttccacgctgtagtgaatatactgagttaaaatagtcagatacgccgggcgcgtaatatgctctctcagctgcaacagcaaagtctctttattgatagccccgtaataccccttaatgtcggtgcggcaaacccagcggtaaccgttttcggtcaggctctgcgagatccgacgtacggacgatctaccaccgccatgccccttcacatgctcacacttctcatgtaccgggatggatggggtgatggacagcgccacccacttaagggccagcgcatcctccgcgggccacatcacctgacggcgtgtccccaccaccaacatgggggacaggtggtgctctcccgactgcagttttctgagaaacgcttcccggcaggcaggccagcgctgtcgcaaatgccagatatccgcattcgctggcgccgttttgcgcgactcacacagccaggcccaggcctcgtctaaacgttgcgcatcacgcaggtcgtcgttatgccacttcgtgcgttcatcgtgctccgcactcagctcattacactgtgtgggattcatgttcatcatttcccgccctgacaggtataggtcacctgacggaccggtttatccggcgacgtcgataaaccggagatgtcaaaactgacacggcactgacgtgctgctgtctcgccccacttaaccagtaactccccccgctccggcaatccggtcagataaacctgtccgtcatcacccacgatgctgctattcacctctgccatccccgcattcagtaacgtgacaactgctccaaacggcaccacgccattgtcgagtttaagcgtcatcagcacctgataacccacccgggtcgcaaagtttgctttgacgacagcgcctttggtcgggtatacattgaggttggtctgtgtgaggtcgacattttccggtaaggtgctggggtcaacacccacgctgttgcgggtgtaatccgtcaggtaaggcactaccgcatatccgcgccagtcggtgaccgccgtaccaccgttgacactcacgccagccgcccccggggcactcaccagcgccaccgaatcgcccatggcacgtgacagcgttatcccgccactatgcaccatcaccccgccactggcgctcatgttgatagcctgcatatcgctgctgtagctgtatccgccgctgatacttcccttgcttccctggtaaccggtatttaagttggtgttactgatctgtccctggttaccccagctttgcgaagcactgtaggacagtttcccgtccatagtgttaccactgagcccggtctgactcagggtccgcccggtgttatcatgagtgagcgtcgtggtggcatacattgattgcaggttacgtgaatagccaaagatgctgaacggcacactgacgttaaacgaaatctggcgattttccggccagttaccgttcgcatcctttgtccgatcaatgttgtagttgacaccgtaactgacgcctttcaggctgttgctgtaacccagcgacatgccggtcagcgtacgttcgcctccccagtagtcatcccggctggcccggaaatacatggttccccagtccccgagttgctggctgagctgcgtctggaagctgttacggcggcgctgcagggaccacgggctgactccctcctgcaactggtgtccctgactgttgaattcactgaaactgtaataatcctcggttgaataccgcagcgcggttaaatcaacagaggtgcccgtggacagcagacttttggaataacggacgcgataagactggcctatcagggtggattcgttatcaaacttcgccgatgaattcgtgatatcagccgagagcgcaccgacgtatcccagggataccccggtaccgatgttgaacgcctggtagtcttttgcggcgagaataccgccgaacagcgtgacatcaccgggcagtccgtataccacggtccccagcataaaatcagcccggcgggaaccatctgtcagattgccgtcatactgtcccgccgtcagctcatacttccagccaccgggacgcaacatgaccggcagggaagagtagggcacgatgaactggcgctcggtgccgtccgcttccgtgactttgacatcatagtcccctgacaggccggcctgctggatatcattgatgtaaaacggccctggcgccacataggtctcgtacactacattgccgttttgacgcacagtcactcgggcattactgttcgccacgccgctgatggccggcgcatagccacgaagctggctcgggagcatctgttcattagagctgagcttcaccccacggaaagggataccgtcaaaaacgtcactaccggtgctactctcacccatgagtaagttcgagcgccagccccgaatatcgcgggcaaggtaggtattcgaaaagcgtgtctgggtggtcgtcagggcattattaccgccgttattttccacccgggtatgggtcatggtgctgcgcaggcgccacggccccgtgtttgccccggcgcgcacggttgcaaagaggttgttattatgtgaggtctggttctggccggaattcgtggtacgaccggcgctgaggctatagttcgccatcagggcggaaatcccctcctcccattgcgacgggtcaaccgcaccacgtacttcaggctgcattgcggcctgaggtacgctgatatccagacgcaggcgcgccagatccagcatggtggtcgcctgagggataagcgcgccaatattgtctatctcagccgtagcaggcaaatctttcaggtccggcagttgcctgacattcactccaaacgtttccagttcagatggcgtgagaaccggcgcaattttgccctgcgtatttttctgaaaatccagggtgtactgccctgcattgcgctggttaacaaatacccataccgtatatttccccggctgaactcccccggcctcagaaaatgcggaaaggtcgacagccgtattatcgccggaattaccaagaaatcccggatcaaaataatcaccggcccaggctgggttaatacaaaccaataaaaaacctgccaccggggagtaacggaaaagcttcccggaagaaggcttcccgaaattagaaataagatgcatgtcgcttttttccattcaccagaaaagattgtatttattaaaatacttacccagacagtacgctgacctgctctggagtattccgtccttcaccgtcaataagactccaggtcacctgcccccgcgcaccggatgataatgggtacctctgctccccaaatggcggtatcatttttgaaagcgcgtttttttcgaccggatatttcccgacagacagtgaacgaaaagtgagataatatggtgtcgggtttatcactttcagttccccactctgcgatataaaccgtatttcccgcgcaaattcggacacatcatactcaggcatcccctccgggcgataaaacagcttcagattattttgcatagccagcgtcaatgacgctgaatccgtgtttttctcctgaccaggtatggttttcaggctcagaataaataccgactcacgatccttaggcagtgtattacgcgttaaacggatacggagcgtcagcgcatctgatgcttccagccgctgtaagggaggcaatacaataaatggcacccctccactctgattaccggatacgttatcctgttcatcagcctgccatggaataacccgcgactgtaaaaggaaaggctttgcggtattattggtaactgtaaatgtaataccattgtggctctcacccggatatatcacgcgtgtggattgtaatttaataccgtcagggttattaccagttgtcccatatgatggcgagctgatgataaacatggaaaaaagcaatatcattagtcgatattgacgcaaacaaaaaatacgcagcatgaggtttattatattccttttacggccgattgatgttcgatactttcaccaccgaaatcattaatggttgtccaggaaacggtccgcacagtcccgttgacggggtaatactgtgtggagaatggcgcaagcattgcccccgcctctgtccctttcacatccatgctcttaccgtctacattcagtcgggacagggtcacgtaatacggcgtgggattgctaatacccagtccatgttccgtattgctgaaagtcagctttttggccgcttcactcgccggcattgacagcccggaaggccggtaaaacagtttaatcaccgactgtataccgactgaaatacgggctgacacaccagactgtgtcccttcggcggcatctgatgtcgaaggaatagccaaaaaactcagataaaaaaccgattcacgatccacaggtaattgtgctgcgccattacggactatcagtaccgaattttgactgtttggctccagcctgaataagggaggcgtcaccataaagggtacagcagacttcgggtccgtctgagtgtttctaccgtcaggtgtcgcaaacacatcggcttttatcaaataaacctggccgctgttattctttatcgtcgcctgtgtatcttttgctctggcatcaaatataacgcgtgtctgactgagctgcagtcccccctcagcggcactcgctacattacagaccagcattaagcctataaacccggcaaaccacagtataaatctgcccgcagcttgtgcgaatacattcatttttatcgctaattcattcataaataaactgaagcgtcacggtggcgttcatattaccgcccttcaacgaaggtccggcagtacagttaccacaggataaacgcgcttcaaaattcagtgtctgaccattaagggtattaagctgctggtccgcagtaccgacaattagcttatccatattagcgattgcggccatctggccttgctgaaccagttttactccatacccctgagaataatcactggccgcattatcattgcggaacagcggaattccggacgtgaaggtattccctttaatctggactttgggtgttaatccccagccactacagtcagaaaacgtcatcgaaaataactgcgggtcgataccatccccccctgccgcaattaccgtggaagaggacacaggcgaaaatgtaatactgggccgatccactgaaatctgacaggagcctccaaccagcgtggctgaaaaattaaccgtcgttgaggaagagcctgcatatactgatgtggtcagtgcaaacaacatgcctgacaacataaagccgaccagttttgtggaacgggtccgttcattgtaatgcatcctttatactctccagattcagtcaaacgataccgtaaacgttaatgtcgatttgacggcgccaggggtcacactttcacttccggccctcaccaggcccagcaggaagggttcgttatggggcgtgcctgcattcccgacgggcgacagagcaaaactgacgttattactgaccgcctgtgaggggttataaaacgatcccaaatctatatctccagtgtcctggcgtaccatgaaccctacacctgtggccaccgagcccggatcgcggaaaatggtactgtctgaatacggtgtgctgcccgacaccgacatctttggcgttgtcgccccgctgcatatcacggtcgccgtcagaggtaacatcgccacggtagcgccggactgaaaatcaacggctttgtggataccaaactggagtgatgactgcgataactggacatcacaggtaccatcgctgatttgcgcggtaaaattcacctccgccgtgtcagcggcctgaatgcccgatgataccaacacgcaggcgagcgccacgccggataacggcttagcggaccgaaccatgaaacacctccgtaccgccataatcattgatagccttccattcaacccgcccctgatgcggcgcacgcgcatataactgagccccaaaaggcgctatcatggtgttgcctgctaccgcactgagaggaaccctgactccggccaccttaagatcggcgagcgtaatgtaatacggagttgggttggtcacccgaaggccctgcccggtggatgaaaactgcagcatacccatagcctgctgctgcggtaacgccagccctcccgggcggtaaaacagcttaactaccgttgccgtggaaacctgaagtgacccccctaccacggatgacggggaagcgctctgcttttcccccgccggcatggcaacgctgcgaaaatagaagagggattctctgtccgtcgccagcccatccgcacccggttttttcaccaccagaacctgattcgtactgcccggctcaaggcgaaataatgacggcgtcgtaatgaacggagtctgtacgttgttaccttcaatatcccgtgagacctgtgccctgaccagataaggtgcgaccgatgagactgaacttgttacgccgacgctgcgccctctggcatcatcactgctctgaaatataatgcgcgagctgtcgatggaaattcccgcgaaggcggaagccattcctgcaaatatcaggagtaaaacaaaagtgacatgctggaaagttttcatcgttaattaataaagggaacgcgttgccacgtcccctattcaccttatggttaattgacaatataagccacagtcaccggtacgctataactacccgctgccggcgtagcgtcagtggtacccatacctacattgaaagaataactattcgtgtcagcagaggtcacatccaaagccacattctgtgactcagccacctgcacatcgttagcatccttaatcataaagccaacggtatcacccgtcgcggcggtaaacagctgcttgctcgggtcggagcttgcgctctgcccctgaataatcagcgcgccagtctcatcagcgcagttggttaattcaaccggcagcgcaacagagccctgctgagtgttaggggtaaaagaacttgctttgtagacccccacattcagggtcgccaggccattgttaacggaaacatcacaggtagagttggtgataataccttccagcgtcacatcagcagacggtgctgcattagccatcatgctgacaccagaaaggcttgcaaaaactgcagcagcgataacacttttcttaatagacatttttcactctcacttatttataaaagacacgtacagaacatttcgccgaaatataatactgcccctccccctgggcaaacaatgagacaggcagagtccttgtgagcgattaagattacatatgtaatccactccactctcctgtaaccggaatgaaaacactgtatacaccggactgacacgcaaaatgaataacggatgatgatgacccggtcttcaaacagactggtatcacgcagatataacgatgagcgctaataaaagcgatattttgaccagcattcaatttacctgccagaccaggcgttgttgaaaccagcatattaacagagagtataatatatccgaatactattatccggcgcatttagaatgcgcctgtatttcaggttcttcgctctggattattcacatggaaaagaagacaagggatggcgactatcgacagacaacaatgcagagtcaatcgtcggactacatttttaccatcagataatctgaaaaatgccatcaatcaattaagaagtttcgtgggcacggataaaaatggagaatacactgagtttattacgtagatgccccgtgcttttttttgagttatatcgcttatatctgcgatgaacaaacctggtattagccagcctatagaggcgcgaactcattacgtagtacaagctcccccgcaggggtcaccggggcgagtatatctactcattctggaatatagaataaccatgatacctacggaacataaacaactgccattgtcgataacagcaggagaaatatacccactctccccttaagaacaccacctgagcctttgcattattatagttacgattgtaatgagatacaccagagaggggcgtctgtttctccgggagagagatacttcgcactcagtcgcattaaaaaatcccagaaaaaccagcagtgccgggaaacagaagtagtcaaaattggcttgtatttgaacatgattatgacatagacaccatcacctgggatgacagggcggaataaacataccggttttataacctggaaatcttccgcccaaagatatgacttatacatgttgtaagtcgtgacatttagtcagcattgatcgaaagcagagttcgcatagaatcgaaaagttgtcgatcgcgttatatcggaagcaacggtcgttttttggaaataagcagggatctgcttcccttgagtacatcgcaaccgtgctttttagcctgcgcaaagccatactcccggatggcgtcagcccggagtccttcgaaaaggcctcaccgtgaggtgagaaactatctaccggagcgtgatcgctccaaatggtggttttttgcttttctgcatccggactcgccatcgaacgacgctaacacgtggtttccctgctgcgtttttctcctggccagcccgctgctagttaacgacaagcgcaggcctattctccatagaatcttttcgcaaacacattttcagatatcagataacacactgattaaaatcgccattttcccgctaaaagcggctaaaaacgcccttttctggaaatcgatccgcccaggtggctgccctgctttccctccagatggccaaatagcatcttatattccattttgcgctaaatgacagagaaatattctttaaataaccgttttcacagttctagtatgcaaaaatatcttaaacgagtgggtaaatggttatgtcactgtttcattccgtgagcgacctgatcggtcatactcccctgctccagttgcacaaactggataccgggccctgcagtctgtttttaaaactggaaaatcagaaccccggcgggtcaattaaagatcgggttgcgctgtcgatgattaatgaagccgagcgccagggaaaactggcgcccgggggaacgattatcgaagccaccgccggcaataccggcctcggtctggcgctgattgcggcgcagaaaaattaccgcctgatcctggtggtgccggacaaaatgagccgcgagaaaatctttcacctgcgggcgctgggcgcgacggtgctgctcacccgctccgacgtcaataaaggccacccggcctactaccaggattatgcccgccgccttgccgatgaaacgccgggcgccttttatatcgaccagtttaataacgacgccaatccgctggcccatgccacctccactgcgccggagctttatcagcagctggagggcgacatcgacgccatcgtcgtcggcgtcggatccggcggcacgctgggtgggcttcaggcctggtttgctgagcactcgccgaaaacggaatttattctcgccgatccggcgggttccatccttgccgatcaggtcgataccggacgctacggcgaaacgggatcctggctggtcgaagggatcggcgaagattttatcccgccgctggccaggctggagggggtacataccgcgtatcgcgtcagcgaccgcgaagcgttccacaccgcgcgccagctgctgcaggttgagggcgtgctggccggctcttccaccggcaccctgctcagcgccgcgctgcgctactgccgggcacaaagccgtccgaagcgggtagtaaccttcgcctgcgacagcggcaataaatacctgtccaaaatgttcaacgacgactggatgcgccagcaaggactgatcgcccgccccgaacagggcgatctcagtgattttatcgccctgcgccatgacgaaggcgctaccgtcacggccgcgccggacgacaccctggccgcggtctttacccgcatgcggctgtatgacatctcccagctgccggttctggaggatggccgcgtggtcggcatcgtcgatgagtgggatttgatccgccacgtacagggcgatcgccaacgcttctccctaccggttagcgaagcgatgagtcgccatgttgaaaccctcgataagcatgcgcccgagagcgaactgcaggccattctcgatcgcggtctggtggcggtgatcgctgacaacgcgcgttttcttggcctggtcacccgcagcgatgtattgaccgcctggcgtaaccgagtcgcacaataaggaattttttatgtcatctatccacaccctgagtgtacatagcggaaccttcaccgacagccacggcgcagtgatgccgccgatttatgccacctccacttttgctcagccagcgccggggcagcataccggttatgaatattcccgcagcgggaatcccacccgccacgcgctggagacggcgatcgccgacctggaaaacggcacgcgcggctacgcgttcgcctccgggctggccgccatctccaccgtgctggagctgctggataaggacagtcacctggtggcggtcgatgatgtgtatggcggcacttaccgcctgctggaaaacgttcgccgccgtagcgcgggtctgcaggtgagctgggtgaaacccgacgacctggcgggaattgaagcggcgatccgccccgacacccgcatgatctgggtggaaacgcccaccaacccgctgctgaagctcgcggatctcagcgccatcgccgccatcgcgcgccgccataacctgatcagcgtcgccgataacaccttcgcttcgccggcgatccatcgcccgctggagcatgagtttgatattgtggtgcactccgcgaccaagtacctcaacggccattccgatgtcgtcgccggcctggcggtggttggcgataactccgagctcgcggaaaagcttggctatctgcagaatgcggtaggcggcgtgcttgacccgttcagcagcttcctgacgctgcgcggcatccgtaccctggcgctgcggatggagcgccacagcgcgaacgcgctgcagctcgccgaatggctggaacagcagccggaagtggagcgagtctggtttccctggctggcctcgcacccgcatcatcagctggcgcgccagcaaatggccctgcccggcggcatgatttcggtggtggtgaagggcgatgaaggttacgccgagcgcatcatcagcaagctgcgctggtttacgcttgcggagagcctgggcggcgtggagagtctggtgagccagcccttcagcatgacccatgcctcgattccgctggagaaacgcctggcgaacggtatcacaccgcagctgatccgcctgtcggtggggatcgaagatcctcacgatctgattgccgactggcagcaggcgctgcggagggagtgattattccgacgcgcgggtcgttgtcagcgcgtcggccattccctgctgaaggtgggcgataaactgcgtcagcttcggcaggggccgacgatcctggcgccagagcagatgcacaggccgcggctgcggagtccacgcctccagcacccgaaccaggctgccgctggccagcgcatcggccagcagcacctccggctgcatcagcagcccggccccggcgatcgccgcctggcgcagcgcgtagccatcgttgcagcgcaaaaccgcatcgcgtttccagcgcacttctccctctacgcccggcagccgccactcgttgcgggcggtccagaccgtatgggacaggcagagatgatcggtgagatcttccggcgtcccgggcgttccgtaacgcgccagataagccggcgcggcgcagatcaccatccgatacggcgccaggtagcgagccaccagatcctcctgatggatctcgccgatacggatcgccagatcgaccccctcatccaccagatcgaccatccggttagtcagatccagttccacccggaccgcaggccaggcctgcaggaaggtggcggtcaggggcgcgatcacgctggcgccgaacgaggtgggagcgctcacccgcagggtgccggccggcgccagccgcagccgctcgaccgcgctttcggcgatggagacctgctccatcacccgtttcgcttcgtcaaaatagactcgcccggcgtcggtgaggctctggcgtcgggtgttacgctccagcagacgcgtcgccagctggctttccaactgggcgatatatttcccaaccatcaccgccgacagccccaggcgcgacgccgccccggtaaagctgccgcactccaccacggcaataaacgtctccatccctcgtaatttgtccatattgctaacctctggttagtaatgttctaacttttagccagtttatccgagattacttttattaaaaaatagcctctcacctcatcaggagtctgccatgaaaattatcgttatcggtgccagcggcaccatcggtcgcgcggtcagcgaagatctgagtcagagacatgaggttatccgcgtcggccgcacccggggagattatcagatggatatcacctcgcaggagagcgtcgaggcgctatttgcccaaacgggtgaagtagatgccatcgtctccaccaccggcaatctgcactttgggccgttaagcaccatgaccgacagccagttcaacctcggactgcaggacaagctgctgggacaaattcgcctggcgctggtcggccagcattttctgcgcgacggcgggtcgattaccctggtcagcggtattgtcgcgcaggaacccattgctcagggggtcaatgccacgacggtcaacgccggtctggaaggctttgtccgcgccgccgcctgcgaactgccgcgcgggatccgcatcaatctcatcagccccaccgtgctcagcgagtcgctggcggcctacggcgactttttcccgggcttccccagcgttcccgccgccgccgtggcgcaggcctatcgccgcagcattgaaggcgttcagaccggccgcatctacccggtcggctactagcctgtgccggcccgccggggccggcgcttacatcaggccgtcgttgcaggtacactgacggctgattgtctccggccgaaaaactgatgttgaaaaaattatccttaattatcccgctactggcgcttatcgcgctgctggtctggtggttcaccccgcattacaccgaggaagatgaagcttactaccgggcggtattttgcataatcgatcatgacgacagccgccagttcctccacgatatgcagaatatcgtcgaggggggaaattctgactacgcgctgcataaaacccattaccttccggcgctggggcagcggatgctggatacctggcgccagctcagcccgcaggaacagcaggcgctgcgtcaggacaagcagcgctgcggagagatattgcgcgaaaaacaacaggggaaatcatcctgacgagttggcaaaattgcagcatatcgccagcgtcgaataagattgtgctgttgatgaccggatcgctgtcacaaaatatccggtcgtcgtcgcgtcacagtacgacgttttttctgcggcggaatacgataaaaagtagttgatctggtacgaactaactcttattttgcttcacagttttcaaaatgagataaaactgatgcctgtcattattgccagtagtgttaaagaagccaaagcgttaattaacggtggaaaatacagggaaattattcttaacttcgatattgatgccgatgactttttctctctcgccagccattccgccggaactaaaatctccatcgccgaccgcaacgatcgctctccggtagaatcagcaaaataattaacccgcgagggacgtctatgtggttgtttattggaacctttgcgctggcttttctcgcagcgctgatgctggtctggctcgatgaccggatcgccgaaacggattgaccctgcgctggacgttaacgtcacgcagggctgcgcgccgccgaaaagcggcgcacagcagagacgttacagggaggccgccagccgctcaacggccgtcagcaatccggcttctgacaccgtggagtaagaaagacgcagggtacgggtatccggcttatcgtgataaaacgcttcacccgggacgtacaccacgccgttttccagcgttttcttcatccattccatggtatcgaacggatagcggaaacgcgcccacaggaacatccccccctgcgggcggctgaattccaggtgctcgccaaggcggctttccagcgcatcggccagcgccacgcacttcttgcggtagtcttcgcgaatcaacgcaatcttgttatccagccggttcagactgaggtattccgcagtgatcacctgcgacagcatattggtatgcagatccgccgcctgcttcacaatcaccgtctgctgcgccagccagtccggcatgacgatccagccgatacgcatccctggcgcgaggattttcgaaaaagtcgaggtgtaaaccacctgatcttcacagcccagctcgacagcatgctgatagagcgggcgccgaacggcgtcagtaaagctaatttcgccgtagggatcgtcttccagaatgacgaaatcatattttttcgccagctcaaccaaccggcgacgacgcgcctcgctcagcgttttgccgccgggattgccgaacgttggcaccaggtaaacagctttgacgcgggtggtctccagcaggtcggccagctgctccaccagcatcccgtcatcgtcggtgtcaacgctgagaatattggcctgcgccagctgaaatacctgcagcgccgccagataggtgggacgctcaacgacgatagtatcgcccggatcgagcagcgtacgggcaacgatatccagcgattgctgcgagccggaggtgatatagacctgggcggctgaacaggcgacgccacgggagtggcaaatttcactcaccgcctggcgcagcggcgggtagccttccgtcagaccgtactggaatgcgtcattaaaacgctcgctcatcaccttctgcaccgccagctccaggccttcggtatcaaacagttccggggccggaatgccgccgccaagcgaaatcacgccgggcagtttactgtgcttgagaagttcgcggacggcggagggcttgagttcacccgcgcgggcggcgagacgccgatcgtgcatactattttccttttctgtcttgttgttgtgttaattatcttggctttgttgcaggtgctccccggcggcgcttaccatgccggggctatccttttcagtacgttgtcacccggacaggggtatgccgctacccgggtttcgtacgtcatgctttgtctttcaaaacgattaacggctcgatatcgctctcttttttcaccaccagcgacgaatcgccgcgcaggcaggtaccgccgtagttaccgccgacggtaaatgtgcacacctgaatgtacttaccgtccactttcggcaggcaccacagctgctggtagatattcttgcgatcgacaaactggccgctggtcttatccagaagttcatcctgagggccgatcaggtcgatattgttcccgcagcgcccggaaataggcttcaccgcatagccggttttcgccagctcgtcgttaacctcaaaatcggtatccagcagatagcgatgatgcgggaacagcgaccacagcaccggcagaatggctttgttgccggggatcaccgtccacaggggttcgaataccaatacttcaggacgcagcaggacgtcaatcagccgcacctcattctgcggatgtccggtacgaatcggtaccgccgcgtactcctcggcgctgacttcgcgcacctgctcaatggcggtttcccatgcccaggttttccagacgcagttgaccagccgcccgtcggcgtcgatcagctgaccggcagcgtcccagcgcagctcatcaaggccaaagagaattttgctctcaaaaccggcctgggtcagcgaacgctgaataaactgcgcgtggtagttctcttccagatccttgtcctgcatgatgtggacgaagggccgcgcccggctgtgtttccacgcccccgccagctcatcgagcagaccttccgccggattgtggccggtgccgtagtagccctgcttcagccactgttcgaggatcagcccgccttcggtatggcaggaagcggaatcggcattgtactcgtacaccttcagcccgcgctcgtccatgcaaaaatccatgcgcccggtgatcatatgatgacggcggcgctgccacgagaggcgcagacgaggccagagaattttcggaatatcgaacagcgccagtaggttgtcatccttcatcaccttatcggtggcgtgcagatacatcaggtgcagctcgttggtggctttgatcagctcctgttcggcactttcgctgatggtgaaatactgatagggatcctggttgatgaaatgaccgttggctgccacataggctttctgcagcgggtctttctcgttcagccatttaccgcgaaactggccgttgtttggcagccgcgcgcctttgatggccatcgcctcgcccggcagcaccggctgcggcaggctgtgttcggtatcggcggtctggatcatccagcctaaaatttcggtatcggcaaaggtatctttgatggtgtaccggccgtcgttgacctcgagggtcagctcgcgggtccactgctggccctgcggcagcggcgagtgaatcacgttctgctcggcgatacgcaccttattgccgacaagctgggtgatcaccgccacatggccggtgtgcttaaactcgccccccttctgccagatcagcagcgaaccagcgataggcggacggcgggagccgttggcgaaggcctgcagcggcagaatattgtcattgaccacttcgcgcaggaaacgcagggagaagatttcataagccatccccacatcggtgaagacaaagccataggtcaggaacagaaagcggcgcgcaaactccacgcactgccatttatgccccatatactcattgccgatgtagctgcgaaacgtcgcgtcatccgggtagtcctgcggatttaagctactgtaattcgatgaataaatcgctacgccaccgggtgcatagcctaacaatgtcccaaacggggcgtcactgcttgtcgatcctttgctcatttagcctgacctcaaattaatgcagcccgggcagttggcgaaacaaaactccctcttcttatcctgccgcaggcacttaccagacagaggtgtaacgatgataccactcattcgtttcgctaatcgtgccgttaaggaaaataaccctgcagccggaaacaaaagtgatatcgttatcggtgatataacaaaaaaacaacgcaacatcaggagtcgacaatgagcacaccctcgcatctgaatgcccaaccgctggtctggggacacggcccgcggacgtttgaggtgttccttgagcccacctgcccctactctgtccgcgcgtttaataaactcgacgatctgctcgatgaggtcggcgccgataacgtgaccatcaagatacgcctgcagtcgcagccgtggcatctgttctccggggttatcgtccgctgcatcctcgccgcgtccaccctgccgcacggcagagagcaggcgcataaggtgatgcaggccgtggccgaccatcgggaagagtttgagtttaccgatcactgcagcgggccgaatatgaacgccacgccgcagcaaatcattgagcgcattgaacgctacagtcacgtgctgctgggggccgcctttgcccgcccggagctgcaggacgtgatcaagtggcacagtaaatacgcccgtcagaacggcatccatgtctcgccgacctttatggtcaacggcctggtgcagccggatctgggcagcggcgatgatgtcagcgtgtgggccgcgcggattatggcctgaggtcacctgctacactttttgtacatccacgaaaaaggcaaaccagcatgtcagagcaaaactaccagccaccaaaagtgtgggaatggaagcaaaacagcggcggcgcgttcgccaacatcaaccgtcccgtttccggcgcgactcatgaacgcgtcctgccggtgggaacccatccgctccagctatactcactcggcacgcccaacggccagaaggtgacgatcatgctggaagagctgctggcgctgggcgtcagcggcgcggagtacgacgcctggctgatacgcattggcgaaggggatcagttttccagcggctttgtcgagatcaacccgaactcgaagatcccggccctcagcgaccattccaccacgccgccgacccgggtatttgagtccggcaacattctcctgtatttagcggaaaaatttggtttcttcctgccgaaagatcctgccggtcgcaccgaaaccctcaactggctgttctggctgcagggcgcggcaccgttcctcggcggcggcttcggccacttctataactatgcgccagtgaagatcgagtacgcgatcgaccgctttacgatggaagccaaacgccagctcgacgtgctggacaaacagctcgcccgcggtcgctatgtggccggcgaggagtacaccatcgccgatatggctgtctggccgtggtatggcaacgtagtgctgggcaatgtctataacgcggcggagttcctcgacgccgggagctataaaaacgtgctgcgctgggcgcaggatgtcggcaaccgcccggccgtcaagcgcggacgcatcgtcaaccgcaccaacggcccgctcaatgagcagctgcatgagcgccatgacgcccgcgactttgacacccaaacggaagataagcgccaggcgtaagatcttcaccctttcccgttgacgggaaagggttcccactacaggacggttccgcctgcgaagccgtcctgtttagctttccagccgatagcccgccagaaaatagcgcatcgccatacccgacccaccttctttgaagaaatccatcaccatatccctgtccaggccatagcgacgggtgaggatccccgcttcccaggcgctgagctggcggtcgccggttttttcaaacatgcggtgcgagtagccgagcacaaacccgcgtttatagtcggcgcaaaaattcgccgcatgcgcggcggtgtcagcataggatgcctgtagccccgccattaagcctttgccaaaatgattttccatcgcgccctcccaatcgttatataataaattatatagcgtttttttgagcgagcggtagcgctatttatgacggttgcgctagcgtaaatacttctcaaaccatgccagcgtgcgttgccaggccagatcagccgcagcccgatcgtagcgcggcgtggaatcattatgaaagccgtgattcacgccctgatagaaataggcctcgtagactttatggtgttccttcaacgcctgttcataggcaggccagccttcattaatgccgctatcgaggccggcatagtgcagcagcagcggtgctttaattttatcaacctccttcagcggcggctggcgaccgtaaaacggcaccgcgcaggccagctccgggatagccaccgccgccgcgttgctgacgccgccgccgtagcaaaaaccggtgataccgaccttccccgtcgcctgtggatagttcgccataaacgcgaccgccgcaaaaaaatcattcatcagcttcacgggatcgactttctgctgtagggcgcggccttcatcatcattccccggatagccgccgacggcgctcaggccatccggcgccagcgcgatgtaccccgctttcgctacccgccgggctacatcttcaatataggggttcaggccgcggttctcatgcaccaccaccacagcgggcgctttgtcggctatttttgtcggcgtcaccaggtaagcccgcacttcgccgtgaccgtcaggagagggataatgaatatactccgggcggatatccgggtcggtgaacggtacctgctctgccagggcataatcgggcttcagcagattaaacagcgccagcgcggtcatcccgccgacagtatatttccccgccagctggagaaactcgcgtttactgattttgccgtgggcatagtagtcataatattcgagcaactgctgcgggaaatctttggccgttaatcgcgtcatcaccctgcctccgttgttaagcgctctttaagcaaagcagaagcccggacatacgccagcccagaaaagcatgatacggggagaaacagcccagcggctaacaccgccgggagagaagggatcagtgtttcactttggtcagacgatcaaggtagcccatcacaaaggccgaaagcacgaaggtcaggtggataatcacgtaccacatcagcttattgtccgggacgtttttcgcatccataaacacccgcagcaggtgaatagaggagatcgccacgatggaggcggcaaccttatttttcagcgaagtcgcgtccattttgcccagccagctgagtttttctttaccctcgttaatatccagctgcgagacaaaattttcatacccggagaacatcaccatcaccagcaaaccgcccaccagggtcatatccaccagcgacagcagggtcagaatcatatccgactcactgacgctaaaaatatgcggcagtatgtggaagatctcctgaaaaaatttgatggtcagcgcaatcagaccgagcgagaggccaaaataaaccggcgccagcagccagcgcgaggcgtacatagcattttccagaaagcgttccataagatcctgtcagttaacataaacggccgccattatatcgcaacagggtaacgcttatgcaacatcagccgccagcgtcatctacaggcggccagaaacggtttctttaaagtatgacctcaaagtcctgcaaagcggagtagccctcgctttgtaggccaaccattgaagcagccagcaggccaaatttcgcgccgacccattttcccttcccggcagcaaaacaaagaggaaccttccgccactcctcctcggctcgccaggaaaattgacacaggccgccttcgcctacggccacctgcagctgacacttgccgcacttaagctcagcaagaacctgacgagtttcgcgcaccacgcccgcatcgctcatccaaccgtgtcgccacacgagccggtaacccccttgcccaaactccaccagcaaagcggcgtagcgttcgccgtatacgatcaggcctccggcatcaccgtcctgagcggcatataacgttacgcttgttttcgcgctaaaagttagcgccgggaatttctgcagcaacagctgcggcgcccagtataacgctctctgtccatcgacttcggataatgggacgcagcgtaatcgaagttcgccttccgccggcagcagccactcagggctggggttagcctgccactgccactgtattcccggttggccttgcgcaaaatagtcgctggtttgcggcgccaatgccggtgaaggcgttaaccctttaggacgcggccaacgtaaaaccggctgtccgacgccgcagttgccaatctgctcaccgatacgcggccagccatcgttaccccaggacatcggctggaggtgaaccacgcggccatagaggtgtaagtcctggaaatgaacaaaccagcattcgccctcctcaccctccacccagccgccctgatgtggtccatttatcgaggtgtttccctggaaaagcacgtttttggcttcccagggccccgtcatctggcgcgcgcgcagtaccgtctgccagccattttcaaccccgcccgcaggagcaaagatgtagtaccaaccggcgcgttgataaacctttggaccctcaagggtaggtaaatcgcagcagccgtcatagataatctgcccttcgcccagcaattcgctggcgtccggcgccatcgcaaacaactgcagtttatgcttgatgccgctgcggctatgggcgaaggcatgtaccaaccaggcctgaccattgtcgtcccagaacgggcagggatctatccaacctctggcctcgcgcaggcagtgcggagcgctccatttcccccacggatcctcggtatggcagataaaaataccttcatctggcgtgctgaagcagacccacagcttgccatcgtgccagcgaatcgacggcgcccatacgcccttacccggctgataccggtcataaccaggtagcggcagttcatccataacgtggttgatgatagtccaattaaccaggtccgttgaatgcaggatcggtaaagcgggcacatggttaaaactggaagagaccataaagaaatcatcgcctacgcgcacgatatccgggtcggaataatcggcgcataagataggattctggtattcagaaggggtcatatttcgcatctcctcaggccttttccggaacggcgtttagcggcaaatgcgtctctgaatgcccctgctgctgacgcatggacagctcgcgctgaattgtctgcatcattttgtcatccagtttatagaaacgcgccagccaccacaggagcaggtaagatagtgatggaccgagggttaacagccccacaattcccattgtcgccagcggagtctgcgccgttacgcccgcctgatagccaaatagcccaagcgaaaaacctacggcggcgccagcaaccgccatgcccattttcaaagcaaacagattaccggaataggataatcccgtgatgcgacggccaaacttccattcgccataatcggcagcgttggccatcatgttccatttaaacggctggtacatctgatggaagaagccgaccaggaagtataaagggaacaccaccggcagccaggtcggcggcacaaagaacattacgacgccaaccaggaccagcaggaggttgatatttttaaacagcgataccgcgcgatagcgcttggccagccatccggcggcgatgctgccgataatcgtgccaacgacgctggtggaaacaaatgctgatttcatggccgttcccgccgctgactccacaccgcctaacatcaggtaggttgcataatagagcgtggcggcgctgcgcataaccccggccatactggagaaaaaagtaattatcgccacaatacgccactggtcattcgccagcagctgacggaggtcttcgcgtatgctcccctgctgttcaacagctggagccacgcgttctttggtagagaagaagcaaaaagccagcattacaatagcgatcgcgcccatgattcccattgtcgcctgaaaaccaaactgcttattttctttaccgaaaaaatccaccaggaacagggttgcgacagaaaccatcagaccggccagagatgagatcgtaaaacgatatgactgggctgaaaggcgatccttctcatcacgcgtaatgactccgcccaatgcgcagtagggaatattgataaaggtgtaacacagcatgagtaaggtgtaggtcaggtaggcataaaccagtttacccgatgcgccaaattccggagtcgtgaaggtcattaccgccagcacggcataaggtacggcaaaccagataagccacgggcgaaaatggccccagcgggtctttacacggtctgcaacaatgccggttagcggatcggtaatcgcatccagaacccgcgtcaccaggaacatcactccgactgcggcagcagaaagcccgtaaatatccgtataaaaccatgtcagaaacatggttaccgaagagtaaacgataccgcaggctgcatcccccatgccatatcccagcttctccgcaaatgacagtttattatcgtgattcacaatataatccctctcagatgaagtggtattcactgtagaggcaggataaaaactatcctattgtcatttttcgcatcgggtttatgttttctgttaactgagaaagttgtcacacatctataagattggtcttacaagttattgcgccacctattaaaaagctggcgcaaggccagcctgaggagaaaagtggaaagggggaggttacttcgctttgacggtctcttcgcccaccagcccgatcttgagatagcccgcctgatgcagggtatccatcactttcatcatcgtctcgtaatcgacggttttatccgcgcggaagaagacggtggtatcttttttgccggcggtcaggctatccagggcgttaatcatattcgcttcggtaaccgggtcgttgccgaggaacatgctcttatccgccttcaccgacaggtagatgggtttttccggtcgcggttgcggctggctggaggaggccggcagattgaccttcacgtcgaccgtcgccagcggcgcggccaccataaagataatcagcagaaccagcatgacgtcgataaacggcgtcacgttgatctcatgcatttcgccgttatcgtccaggttttcattaagacgcatcgccatagccgatcaacctacccgtaatttctgcgcgctgcgcaccggcttcacgccgctggcgctgaggtccagatcgcggctttgcagcaggagtacctgagcggcgacgtcgccgagcgaggccttgtagctgccgatcatgcgggcgaagatgttatagatgaccaccgccgggatggcggcgaacaggccgatggccgtcgccagcagcgcttctgcgatgcccggcgctaccaccgcaagattggtggtctgggtctgggcgatgccgataaagctgttcatgatgccccagacggtaccaaacagacccacaaacggggaaatggcgccgatggtcgccaggtagccgttaccgcgccccatatggcgaccgaccgccgcaacgcggcgctcaaggcgaaaaccggttcgttccttgatgccttcattgtcttcggcaccggcagagagttcgagttcgttctgcgcttcattgataagctgggtggtgaggcttttcgcctcaaaggcgctggcgatatcgctggcctgatcgagagagcgggcttccgccagctgctgctgttcacgtttgaggcgacgcttgctggcgaggatttccgcccctttaccgaagaagatggcccatgtgacgaccgacgccagaatcaggccaatcatcaccaccttaacgacaatatcggcatgatgatacataccccaaacggagagatccgcctgcatcaaattattacccacgctctatctccacgacgataatcacaaaatctgcccacaataatatcaaaacgacatcgaattgatagtggttctcattagtatttacactgtgcagcaaatcacgtttattttccttgcgcttacgcagtaaaaaagcggctaaccgcgggcctggtaaaattttcgcctgtatcggcggtgcgctggtatagaaaagcagattcatgttagtttagacgtccagacgtataaaaacaggttcgtcaacatggctgataaacatcttgataccgcgctggtcaacgccgggcggagcaaaaagtacacccagggctcagtgaacagcgttatccagcgcgcgtcatcgctggttttcgacaccgtcgaggccaaaaagcacgccacccgcaatcgggccaacggcgagctgttctacggtcgtcgcggcaccctgacccatttctcgctgcaggaagcgatgtgcgagctggaaggcggcgccggctgcgccctcttcccctgcggcgccgcggcggtggctaacactatcctggcgtttgtcgagcaaggcgaccatgtgctgatgaccaataccgcctatgagccaagccaggacttttgtaccaaaattctcgccaaactcggcgtcaccaccagctggttcgatcccttaatcggcgccgatatcgcccgtctggttcgccctgagacccgcgtggtgttcctcgaatcgcccggctcgatcaccatggaagtgcacgatgtgccggcgatagtcgccgccgtgcgtcaggtcgccccggaagcgattatcatgatcgataacacctgggcggcggggatcctgtttaaagccctggattttggcattgatatttccattcaggcaggcaccaaatacctgatcggccattccgacgccatggtgggcaccgcggtggcgaacgcgcgctgctggccgcagctgcgtgaaaatgcctacctgatggggcaaatgctggacgccgatactgcctatatgaccagccgcggcctgcgcaccctgggcgtgcgcctgcgtcagcatcatgaaagcagcctgcgcatcgccgagtggctggcgcagcacccgcaggtggcgcgggtaaaccaccccgccctgcccggcagtaaaggtcatgagttctggaaacgtgatttcaccggcagcagcgggctattctcgtttgtgctcagcaagcgcctcaatgatgccgaactggcggagtacctcgacaatttcagcctgttcagtatggcctattcgtggggcggctttgagtcgctgattctcgccaaccagccggagcaaatcgcccacattcgaccggatgctgaagtcgacttcagcggcacgctgatccgcctgcacattggtctcgaaaatgttgacgatctgcaggcggatttagcagcgggcttcgcgcgtatcgtgtaaagtgacagtcagtggcaacaatagcggacgctttttagcaaagcggccgcttttgttgcgcccgggatcaaggtgctcgggcctcttcaggagtacactagtcaacaatacggtaccacttaggaaagtccatggttgtcattcaagagattgtcgccgcgctgtggcaacatgattttgccgcattggcgaaccctcacgttgtgggcgttgtatatctggttatgttcgcgaccctgtttctggaaaacgggctgctgcccgcctcctttttaccgggagacagcctgctgctgctcgccggcgcgctgattgctaaaggcgtcatggactttgtgcccactatcgccattctgaccgccgccgccagcctcggctgctggctgagctatgtgcaagggcgctggctgggcaatacgcaaacggtgaaaggctggctggcgcatctgccgcataagtaccatcagcgcgccacctgcatgtttgaccgccacggcctgctggcgctgctcgcgggccgttttctggcgtttgtccgcaccctgctgccaaccatggccgggatttctggcctgccgaaccgccgcttccagttcttcaactggctgagcgccctgctgtgggtctgtgtggtgacgggtcttggctatgcgctgagcatgatcccgtttgtgaagcgccatgaagatcaggtgatgacctgtctgatgatcctgccgattgccctgctgctggctggcctgctcggcacgctgttcgtggtcattaaaaagaaatattgcagcgcctgacgcttacctgccggggggcctgcgcccgcccggccgccctttcccggtattacatcccctgcatcgtgcgaatacgcgcggcgtcttctcccggcgtcaaaccgaagtagcgcttaaactcgcggctgaactgcgaagggctttcatatcccacgcgcatcgccgccgcgctggccttcatgccgtcatggatcatcagcattcgtgctttgtgcaaacggtagtttttcagatactgcaaaggagaagtgctggtcaccgctttaaaattatggtgaaacgctgacacactcatattcgcttccgccgccagccgatcgacgctgaggttttcggtgtactggctttcgatatgcttgagcacgcgacttatcaggctgaagtgggtctgccggctgaccagcgccaacagcgcgccgccgcagggccccgtcagcacataatacagaatttcgcggacgatttgcttgccaaggatccgtgcgtccagcggccgctccatcacgtcaagcagccgttcggcagcgcacagaatatcctccgagagtaccgcggagtttatcccgctggaggcgaccgcgggctgaaacagcggatcttcgccaatatccatcagcagctcttgcagttgcaggatatcgacgttcaggcgcatcccggcgaggggcacctccggggtggcaaaggtttcgcactcgaaaggtagcggcacggtcagcagtaaatattcgtttgtatcgtagcgaaaagtccgttcattgatataaccaattttatggcccgaaaagagaaaaacgatccccggctgatacatcaccggcgtccggggccccggttgcgttccgtacagcaaacggacgtcaggcagcaacgaacttaacatttcgtgcttatctttcagcaggttaatcttctccgttaatgtccgacatatctctgcgtgttgcattgccaccgtctctcccgatgtttcttcacctgtacattgtgcgcaggccgctacaaattctccagccatatggagaaataggcaagacatcggcaggaatgtgcattgagggtcaacggcgccaggaccacaataaccttcatcgggcagcggtatcgtccctgtcgacggttttactctttggaggacttaagcaatgaataatttcgacctgcataccccaacccgcattctgtttggcaaaggcgcgattgaaaagctgcgtgaacagatcccggcggaagcccgcgtactgatcacctacggcggcggcagcgtcaaaaaaacaggcgtcctggatcaggtcctcaccgctctgaatggcctggatgtccttgaatttggcggcatcgagccgaacccgtcttacgaaaccctgatgaatgcggtgaaactcgcccgggaagagaaagtgaccttcctgctggcggtcggcggcggttcggtgctggatggcaccaagtttatcgctgcagcagcccactacgacgcggatatcgatccgtgggaaattctggaaacctatggcagcaaaattgccagcgccattccaatgggctcggtactgactctgccggcgaccggttctgaatccaacaaaggcgcggtcatatcgcggaaaaccaccggcgacaaacgcgcgtttatgtcttcgcacgtccagccgcagttcgcgatcctcgatccggtttatacctataccctgccgccgcgccaggtcgcgaacggcgtggttgacgccttcgtccataccgtcgagcagtacgtgacctacccggtagacggcaaaatccaggaccgtttcgccgaaggcattctcctgaccctgatcgaggatggcccgaaagccctgcaggaaccggagaactataacgtgcgcgccaatattatgtgggcggcgacgcaggcgctgaacggcctgatcggcgcaggcgtgccacaggactgggcgacgcatatgctcggccacgagctgacggcgatgcacggcctggatcacgcccagacgctggctatcgtgctgccggcgctgtggaatgagaaacgcgatgccaagcgcgagaagctgctgcagtatgccgagcgcgtgtggaatattaccgaaggctctgacgaccaacgtatcgatgccgccatcgccgcaacgcgtcagttcttcgagcagatgggcgtgccgacccgcctttccgattacggtctcgacggtagctccatcccggcgctgctggcgaaactggaagagcacggcatgactaaacttggcgaacatcaggatatcaccctggacgtcagccgccgtatttacgaggctgcacgctaagcgctccccgcctgattcacctctccttacgttaaacaaacgccggggagaggtgtttttactaccgtttttagctatttcgtccagacttaatgctacccctcggcggatcctgcttcgccgagttcattaacaggaggaaggcatgacacatccaaccgttataaaactgcacgacggcaacctgatgccgcagctgggtctcggcgtgtggaaagctggcaacgaggaagtcgtctccgccattcataaggcgctggaagtcggttatcgctcttttgacaccgccgccgcgtaccaaaatgagaccggcgtcggcaatgcgctgcacagcgctggcgtcaaccgcgatgagctcttcatcaccaccaagctgtggaacgacgatcaaaaacggccgcacgaggcgctgaaagagagcctcagcaaactgaagctggactatgtggatctctatttaatccactggccggtaccggctatcggccattacgtcgaggcctggcaggcgctgatcgagctgcagcagcaggggctgaccaaaagcattggcgtgtgtaatttccaggtaccgcatctgcagaagctgattgatgaaaccggcgtcgccccggtgatcaatcagatagaactccatccacttatgcagcagcgtcagctgcacgcgtggaacgccacccacaagatccagaccgaatcctggagcccgctggcccagggcggcgaaggcgtcttcgatcaaaaagtcatccaccagctcgccgataagtacggcaaaacgccggcgcaaatcgtcatccgctggcatctcgacagcggtctggtggtgatcccgaaatccgtcacgccgtcgcgtatcgcggaaaactttgacgtctgggacttccgtctcgacaaagatgagctgggagcgatcgcgaagctggaccagggtaaacgtctcggtcctgacccggatcagttcggcggataatgctctctcttgccatcgcctttagcgcctcggcgttaaaggcgatcgcagaccagatgaatatcctctggctccagcgcaaacagcgccgggtcgggcttatccgctaagcgacatccctgagccagataaaaatcgacggtgtttttgttggggatcgacgagatatagaggccggacgcccccatttctggcagctggtgcagggcatactgaaacagtcgccgcccccagccctggccgcgctttcccgccccgacataaaagaataatagctggcgcagctcgccattcatgccgcgaggcagcgtatccagcgccgctgcggcaatcatctgctcatcgtcaaaaaaggcgaaaaaaataccgccgcgatcgtaacaggcctcgtgaatcggagtataaacctgacgatcgtgagggtcccagccacgcacgtcataatattcccgataagcccgcagctgaccgttatcgagacggtagagcgtatcgataatttcgctgcggtctatctcccagagctggtccagttgttgtcgcgacaggatgaccggcgtcatcacctctctccttttttcacagatgttcccggcgagcgatcccgccgggccagccgcttagcgtgatacggccttcggcttaacgcgttttttcgcgcccgcagcggcaggcgtctggcgctgatgggcgatcggcgtgtgcttggtcaacgccggacgagtatggcggttctggcgacgcgcttcacgcatttcgtccagggttggcgctggcaccaggcagtcgcggcgggagccaatcaggtgcttcttgcccatcgcctccagcgcctgacggatcagcggccagtttgccggatcgtggtagcggagcagcgctttgtgcagacggcgctgtttatcgcccttcggcactaccacctcttcgctcttataaccaattttacccagcgggttcttgccggtgtaatacatggtggtcgagttcgccagcggcgacggatagaagttctgcacctggtcgaggcggaagcgatgcttcttcagccacagcgccaggttcaccatatcttcatcacgggtccccggatgagcggagataaagtacgggatcagatactgctctttacccgcctgcttcgaataggtgtcgaacagctctttaaagcggtcgtagctgcccattcccggcttcatcatcttcgacagcggtccctcttcggtatgctccggggcgatcttcagatagccgccgacgtggtgggtcgccagctctttgatatagcgcggatcttcgaccgcgatgtcatagcgtaccccggaggcgataaggatcttcttgatgcccttcagctcgcgagcgcggcgataaagattgatcgtcggctcatggttggtatccatgtgcgggcaaatatccggatagacgcaggagagacggcggcaggtctgctcagcgcgcggcgatttacagcgcagcatatacatgttggccgttggcccgccgagatcggagatcaccccggtaaagccgggcacggtgtcgcgaatggcttcgatctcattaatgatcgaatcctcagaacggctctggattatgcgtccttcgtgctcggtgatcgagcagaacgaacagccgccgaagcagccgcgcatgatgttgattgagaagcggatcatctcatacgccggaatacgcgcatcgccataggaaggatgcggcacccgcttgtacggcagcgcgaagacgctgtccatctcttcggtggagagcgggattgccggcgggttgatccagatgtagcgctcgccgtgcttttgcatcagcgcccgggcgcagccggggttggtttcgtggtgcaaaatgcgcgaggcgtgagcgtacaggaccttatcgcctttcaccttctcgaaggaaggcagcagcacataggttttttcccacggtttgggccgcggcggctgcacagtaatgcttttcgcttcctgttttttcggcgcgaccggtttgttatcggcgcacggcagatcttcaccgtacggatgcgggatggggtcaattttaccgggcgtatccagacgggtggagtccacgccgctccagcccggcagcgcctctttcaccatgatggcggtattgcgcacatcgcggatctggtcgatggtttcgcccatcgccaggcgatgagccacttccaccagcggacgctcgccgttgccgaacatcagcatatcggccttggagtccaccagcaccgagcggcgcacggtgtcggaccagtaatcatagtgggcggtacgacgcaggctggcttcgatgccgccgaggatcaccggcacatctttccacgcctctttacagcgctgggtatagacgagggtagcgcggtccggacgtttgcccgccacgttacccgccgtataggcatcgtcatgacgtagtttacggtcggcggtgtaacggttgatcattgagtccatgttgccggcggtcacgccgaagaacaggttcggttttcccagacgcataaagtcgtctttgctgttccagtccggctgggagatgatcccaacccggaaaccctgcgcttccagcatgcggccgcagatagccatcccgaagctcgggtggtcgacataggcgtcgccggtaaccagaataatgtcgcagctatcccagccaagttgatccatctcttcacgcgacatcggtaaaaaaggcgcagggccaaaacaggcagcccagtattgcggccaggaaaaaaggtcacgatccggttggatcagggatattgcgctcatattgcttccggggaaaatgataaaaaaataaccaaaagggcgtggattataagccggaatgatagtggaaatgaaggaggattttctcaaaccctgaccgtgcgccggccagggtcaaagagtttacggcgcgggattcaccagcatctggccgatcgagccgcgatcggcaagctccagcgtctgactcagatactggaacgggaagtgcggccacgacggttgagcgtaatagaccagcagctcaacctgcccgtcgacccacacggtgtccttccagccgcgatcttccgggaaaggagacgagccgttgacattacggatctggaacatcaccccttcaatatggaacgactgcgggcggtcggcgcgcaccgtccagcgctcccaggtcccctgctgcgccgtgatatcgatacgctgcggatcccacagctggccgttgatgcccggatcgtcgccaagggtgatatcccggctgcggatcggcgtaccggagagcagctcggtcggcagcaggcgcaccggcagactgtcggtcaccagcggcagcagcccggtcggacgcagcgtcagcaccagcgtggagaccaggatgcttgacggttcaaaaaaaccgcggatacggtcgacgatgctcgccgcttcgccgcaggtaatggatacttcatcgccgttagtcatatcgaccagaatttcacgccgctcccccggggccagcgatagctgcttgagcgaaaccggcgccggcaggaatccctgatcgccggaaatcacatgcagcagtcggccatcgctcatctgcagctgatagcgccgggagttggaagcgttcagcaggcgcaggcgcacccagccgcgcgacacttcaacatacgggctctgcacgccgttaaccagcagcgtgtcgcccacaaagccgccgctgcccggttcgctatattccggcgtgccgaagttatccagccgtttatcctgaataatcaccgggaagtcatcgactccatagtggttagggatcggcaggttcttgctgacctcgtcttccaccagccacatgccggccagaccgttgtaaacctgtttcgccatccggttcggcgtgttggcctgataccacagcgtcgccgcgctctggcggataggcagcaccggcgcccagtcggcgttcggcgacatcatgcgcgccgcgccgccaatcagcgggccaggcacctgcagaccgcggatggtcatcgccacgttctccgtcaggcggttgctgtagataagcttgacgtcgtctccgttccagacgcggatcgtcggccccatatagcggccattgatcccccagacgggggcgcgggtgccgggggtaaacgaccagtgggaacgctgcagcgtcagaaacagcggctggccgcgacgagattccagcagcggcggaaccggcagcgcaggctgctggccggcggcatgggccttcagcggcgcggcgccagcgcacagcgctacgccggaagccttaataaactgacgccgactgagtgacatattaactccatgacatactgacaaatgaaaaagggaattcgtttcccgccagcaatacgcgcgcgttggcggcgtttcctgtcttattgctttccagccgcttcgcgctcggccacttcgttgtccagatcagcgattttggcggccatcagctcgcggcaatgcgtcgccagcgcgcgcacgttgtctttaccaaactgcgtggtatctaccggcggcagcatttccacaatcaccagaccgttgttccagcgattgagctttattttattcgatgtattcgagacacacaccggaataatcggcaccccagcggcaatagccgcgtgaaaagccccggttttaaacggcagcaggccgcggccgcggctacgggtcccttccgggaacatccagaacgaaattttacgctttttaaaagcgttgacgacttcggcaatagtgccgtgcgctttggttcggttattacggtcaatcagcaaattgcccgtcagccagtacagttggccaaagaacgggatccatagcaggctctttttacctacggtgaccgtcggagcctgcacgatattcgacgccgtcaccatatcatagttgttctggtggttagcgatgtagatcgcgttgccatagctttccgcgtcggcgggtttgcgtagctctaccttgaggccaaataccggagataaacggccaaacagatggccgaaagtggcaacgtgttttggattacgtgggctgaacaagcagtacagacagccaagtacgcatactacgatgcaataaatgaccacgaaaattactcgaaaaatgaatagcatagctacctctaaaacccaaaccgcttagaattattcgctgctggcagaaggcaggctcacaagttctgcgcaggccgggaccgttcttcctgggtccctgatgatggacattgttaatcgcaacgcctgaataaacaacgattttgcggcattttttcgtctcctcccgtcaaagacgggaggagacgcgcttactcttcgctatcgcctgccgcggcacgacgcggcgagtcaatttccacgcggtcaattttctgcagcccgcgcatcagcgaaccgcggcggccgcgctcgccggtgactttttgcagctcttccggacgcagtttgatcttccgtttgccgacgtgaatggtcagcgtactctgcggcggcagaacaaacagatgtgccagaccgtcctggccggctgcggcttccgccgccggaatgctgataattttgttgcccttgcctttcgacagctgcggcagatcgctgaccgggaacatcagcatccgcccggcggcggtgatggccagcagcatatcggactcatcctcaatcaccagcggcggcatcacgtgcgcgttgtcaggcagggtgattagcgctttcccggcacggttgcgcgccaccagatcgttgaaggtacagacgaaaccgtagcccgcgtcggaagccatcagcagtttctgatcgtcgctttccattagcatatgctccacggtcgcgcccggcggcagggtcagtttgccggtaagcggttcaccctggccacgcgcggaaggcagagtaatcggatcgatggcatagctgcgtccggtggtatcgataaacaccaccggctggttgctcttgcccttcgccgaggctttccagctgtcgcccgccttatagctcaatccctgggcgtcaatgtcgtgtcctttggcgctgcgcacccagcccatctgcgacagaacgatagtcaccggctcagacggcagcatgtcatgttcgctcatcgctttcgcttcttcacgctcgtgaagcggcgagcgacggtcgtcgccgaaggcatcggcatcggcctgcagctcttttttcagcaggttgttcatcttacgttcagacgccagaatcgcctgcagctggtcgcgctctttttccagctcgctctgctcgccgcggatcttcatctcttccagtttggcgaggtggcgcagttttaattccagaatcgcttccgcctgggtttcgctgatgccaaagcgcgacatcagggccggcttcggttcatcttcagtgcggatgatctcaatcacttcatcgatattaagaaacgccaccagcaaaccttcgaggatatgcaggcgcttcagcactttctctaaccgatggtttagacggcgacgcacggtatcgcgacggaacaccagccactcgctgaggatctccagcaggtttttcaccgccgggcggccgtcaaggccgatcatattgaggttgatgcggtagctcttctccagatcggtggtggcgaacaggtggttcatcacctgttccatatccacccggttggagcgcgggacaattaccagacgggtcgggttttcgtggtccgattcgtcgcgcagatcgtcaaccatcggcagctttttattgcgcatctgcgccgcaatctgctccagcactttggcgccggagacctgatgcggcagcgcgctgatcaccaccgcgccgtcctctttactccacaccgcgcgcatgcgcactgagccgcgcccgttctggtagattttgcgaatttccgcccgcgaggtgatgatctccgcctcggtcgggaaatccggcccctgtacgatatccagcagttcgtcgagggtggttttcggctgctcaatcagcgtaatcgccgctttggccacttcccgcaggttgtgcggaggaatatcggtcgccatgcctaccgcgatgccggtggtgccgttcagcaggatgttcggcaaacgcgctggcagcattttcggctcctgcagcgtgccgtcaaagtttggcacccagtcgaccgtcccctgccccagctcgctgagcagcagctcggcatacttcgacaggcgggattcggtgtaacgcatggcggcgaaagatttgggatcgtccggcgccccccagtttccctgaccatccaccagcggatagcggtaagagaacggctgcgccatcagcaccatcgcttcatagcaggcgctgtcgccgtgcgggtgatatttacccaacacgtcgccgacggtgcgggcggactttttgaatttcgcgctggcgttcagccccagctcggacatcgcatagacgatgcgacgctggaccggttttaagccatcgccaataaacggtaatgccctgtccatgatcacgtacatggagtagttcaggtaagcattttccgtaaattcatgcagcgcaaggcgctctgccatatcgctcattaatcgtggatcctcaatctgggtaccgaccgttcggacggcaaaactacccgcgataatacccgatctcacgccctgagtcacaggccgtgagatcgctgaggattccgtcacgcttaatcaggccagcggcagataaatatcggtttgcagttcatgctcagccacctcatggacaaaattgaggtaacggaagtacaccggaaaatcccgtaacgtctcgcctgaagcgggtaaccagtcgcgatagagaaaccaaacgctgttcgccagcgtgtccagcgagccgtgatggcgcacgacggcgcagcgtccgccggggatttcgccgttaatcacgccaaaggcgttttcaccaaccggccgatcgaccgtaccgcagatatcaaaacgaaatgcctcctgcggggtggtctgcggatcgtcccaggcgatcccccaggtatcgctggtggcgacgggcgatagtccgctcgtcttacgccaggcgataaaacgcgcggcggtggcgttgacaaggtccgggctaccgcgatgttgcagtacggctatccgggtggaggggcacgaaataatgttgacgtccatcgacgtttgctcctgtagcgtatgtttcggtacgcgtcgatgccactcggcccagtccggttgttgacggaattgggtcgggctttggtcaaacgcggtacggaaggcacgactgaacgactccgcattctgaaatccggcatcaagggcaatatcgatgactttatcgcgggggttgaacgccaggcgccaacaggcgcgtcgcagacgcaaccactgaatataccggtacaatggaatgccggtataagcgctaaattgccggtgaaaatggtaaggcgaactgtgcgctatcgcgctcagcgtctccaacgacagcggctcatcaagatggcgcgcaatgtacctacagacgcgctggaagcgcccgacatacgccgggctggccttaatatcgttcatcgtctcctcctcgcgacatactctgacagagcgaggatcgcgattcctgaccgatcttgcgcttatccgacggagacttatagcgcgattttacggatctgtttaacgtcgatttctaccgagttccagtccttatcgacttccccctgaatttctactgtgtcctgcgggccgacggtcacgccgttccagcgcttgtggtcgatatcgacattgatcaccccggaagcatcctggaatttatacaggtcatcagagatgcgctcgacgattttaccgcgcagggtcacccaggtgtcatcacgcagcgacttggcgttcgccacggtggtcaccgcgccgctcggcccggtgaagccgccagcctgggtggtagtggtagttgacggtccggtgaatcctccctgcccggcggccagtaccggcatggaaaccaaagcaataatcgcggtcatcgcagcaatttttttcatcttatattctcccttttgtgttggtatggctcctattacgcccgacaaaacttaacgacttcttaagcggaaaaaagaaattttaatgctgtacatcacccgcttcaacgcggtttactgcgcaaagaaacgggatcgtcggagggaaacatgcgcatattactggtggaagatgacaagcttatcggcgacggcatcaaagccgggctgagcaaaatgggctttagcattgactggtttaccgccgggctggagggcaaaaatgccttatacagcgccccctacgacgccgcaatccttgacctcaccctacccggcatcgatggcctcgatattctgcgcgaatggcgcgataaaggccgccatgagccggtgctgatcctcaccgcccgcgatgccctcaaccagcgggtggagggcctgcgcctgggcgccgatgactacctgtgcaaacctttcgccctgattgaggtggcagcgcgcctcgaagcgttgatccgccgcgcgcacggccagagcagcagcgaactgcgccacggcaaggtgatcctcgatccgaaccgcttaaccgccagcctcgacggcgaaagcctggcgctgaagccgaaggagttcgccctgctggaactgcttatgcgcaacgccgggcgcgtattgccgcgtaagcttatcgaggaaaagctctacacctgggacgacgaggtctccagcaacgccgtggaagttcacgtccatcatctgcgccgcaagctcggcagcgactttatccgtaccgtccacggcatcggctataccctgggtgacgcatgaaacgacttgcccgtctgagcctgcgcctgcgcctgacgctgctgtttgccgtactgaccaccgccgcctgggggatggccagcgttatcgcctggcagcagaccagcaaaaagctggataagctgttcgatacccagcagctgctgttcgctcgccgcctgagcgtcatgcatttcgatgaactgcgcgccccgcccgcctcgctcggggaaaagaaaaaggtacgccacgggcacatcgacgacgacgcgctggcgttcgccatcttcacccgcgacggcaaaatggtgcttaatgacggcgagaacggagaggatattcagtggaattcgcagcgcgagggattcagcgatggctatctgcgtgacgacgatgacgagtggcgtttcctgtggttaaccaccgccgacggccgctaccgcatcgccgtcgcaggagtgggattaccggcgcgaaatggcgatggatatcgtgacctcgcagctcaccccgtggatggttgccctgccgctgatgttcgtgctgctcatcgtgctgttaagccgcgagctggcgccattgaaaaatctggcgcgcacgctgcgcctgcgcgcgccggactcggcggattcgctcagcgtggagaagatccccgccgaagttcgcccgctggtcgaagcgctgaatcagctgttccgacgcactcacgacgccatgctgcgcgagcgtcggtttacctctgatgccgcccatgagctacgcagcccgctggcggcgctgaaggtgcagaccgaagtcgcccaactctccctggacgatcccgaagggcgtgagaaagcgttggatcagctccaccaggggatcgatcgcgccacccgactggtggatcagctgctgacgctgtcgcggctggactcgctcgcccaactggatgatgtgcagcaggtcgctatcgccgatctgctgcagtcggcagtgatggagatgtatcacccggcgcagcagtccgggattgagctgcgcctgcatcttaatgccagccatatcgtccgcaccggccagccgctgctgctcagtctgctggtgcgcaatctgctggataacgccgtacgctatagcccgcgcggcagccaggtcgatatcacgctcaacgcccgcgagttccgggtgcgcgataacggcccaggcattagcccgcaggcgctctcgcgcattggcgagcgtttttatcgtccgccggggcaggaggcgccgggcagcggcctgggcttgtcgatcgtccggcgcatcgcctcgctgcacggcatgcaggttgattttgccaacgcgcgcgacggcggcttcgaggcccgcgtgtactggtagcgagattattgctcatttggcaaaagactttgcacattttgctcattttactgccccgcttcgcggggtaagatcgtcggcaaattttcatatatgagggtaaaaaatgagcaacatcctgattatcaatggggcgaaaaagttcgcgcactctaatggtcaactgaacgacaccctgaccgaggtcgcggagagttatctgcgcgacgccgggcacgatgttaaaagcgttcgcgccgaaagcgagtacgacgtaaaagaagaagtacagaatttcctgtgggccgatgtggtgatctggcagatgccgggctggtggatgggcgctccgtggacggtgaaaaaatatatggatgacgtctttaccgaaggccacggctcgctgtacgccagcgatggccgtacccgctccgacgccagcaaaaaatatggctccggcggcctggtgcaggggaaaaaatatatgctttctctgacctggaacgcgccgatggaagccttcaccgacaaagaccagttcttccacggcgtcggcgttgacggcgtttacctgccgttccataaagccaatcagttcctcggcatggaggcattgccaacctttatcgccaacgacgtgattaaaatgcctgatgtcccacggtatatcgcagaatatcgcaagcatctggcggaaatttttggttaactagaggtctagctctacatatttcgagttattcgaacctggagtatgacgagatccacacagaaggagttgagttaaccatgttaacagtgattgcagaaatccgtacccgcccgggccagcaccaccgccaggcggttctcgatcagttcgcgaaaattattccgaccgttttgcaggaggccggctgccacggctatgccccgctggtggatcatgccgccggcgtcagcttccagaccacagcgcccgactctatcgtcatggtcgagcagtgggaaagcgtcgcgcatcttgaagcacacctgcaaaccccgcacatgaaagcctggtcggaagcggtcaaaggcgatgtgctggagaccagcatccgtattctgcagcctggcgtttaagtccgccgactcagtaatgccatgaaaaagggagcctgaggctcccttttacgtctggcgcagcgtacagacttacacttccagatccgccatatcgcccttctcctgcagccagttgcgacgatcttccgaacgctttttggccagcagcatatccattatcgccgtggtctgctgctcgtcctcatcgctgatcaccagctgcaccaggcggcgggtattcgggtcaagggtggtttcgcgcagctgcatcgggttcatctcaccgagccctttaaagcgctggacgtttggcttgcccttcttgcgctttagctgctccagcacgccggttttttcttcttccgtcagtgcgtagtaaacctctttaccgaggtcgatacggtacagcggcggtagcgccacatagacgtgcccctctttcacgagggtacggaaatgtcttacgaacagcgcgcacagcagggtggcaatgtgcagaccatcggagtccgcatccgccagaatacaaattttaccgtagcgcagctggcttaaatcatcgctatccgggtcaataccaatcgccaccgaaatgtcgtgcacttcttgcgaagctaacacttcatcggaagagacttcccaggtattaaggatcttgcccttcagcggcatgatcgcctgatattcgcgatcgcgcgcctgcttggctgagccgcccgccgaatccccctcgacaaggaacagctcggtacggttcagatcctgggcggtacagtccgccagcttacccggcagcgccggaccgctggtcagctttttgcgcaccacttttttggccgcgcgcagacggcgctgggcgctggagatggccatctccgccagcagctccgcggcctgcacgttctgattcagccacaggctgaaggcgtccttcaccacgccggagacgaacgccgcgcactggcgcgacgacagacgctctttggtttgcccggcgaactgcggatcctgcatcttcaccgacagcacgtacgcgcagcgatcccagatatcttccgctgacagcttcacgccgcgcggcaggatattacggtactcgcagaactcacgcatcgcgtcgagcagcccctgacgcagaccgttaacgtgcgttccgccctgcatggtcgggatcaggttcacgtagctctcggtcagcagctcgccgccttccggcagccacagcagcgcccagtccaccgcctccgtctcgccggagaaggcgccgacgaatggtttttccggcagcagcggcaggccgttcaccgcttcgctcaggtaatcgttcaggccatcggcatagcaccagctctgctcgctgttgttcacctggtcgcggaaaacaatttccacgcccgggcacagcaccgctttcgcttttaacaggtgggtcagacgtgaaacggaaaagcgcgggctgtcgaagaagctttcgtccggccagaaatggacgctggtcccggtattgcgtttgccgcaggtgccggtgacgtgcaggtcttccactttttcaccattttcaaaggcgatgctgtagacctgaccgtcgcgacgcacgttgacctccacgcgttttgacagggcgttgaccaccgagatccccaccccgtgcaggccgccggaaaactgatagtttttattggaaaacttaccgcccgcatgcagccggcagaggatcagctcaaccgccggcacgccctcttccgggtggatgtcgaccggcatcccacgaccatcgtcaatgacctccagggactggtcggcatgaaggataacttccacgcgtttggcgtggcctgccagcgcttcatccacactgttatcaataacttcctgaccaagatggttaggacgagtggtgtcggtatacatgcccggacggcggcgcaccggctctagcccggtgagtacctcaatggcatcagcattatatgaagattgcgtcatggtgtgtattcgtaggtcgttcagggccgtttagcgcaggccgagaaattcgataatctgagtgaaatgatcgtcaaagccgacaaatgcgtgattaccgccctcctctaccgtctgccggcaagaggcgtagtaatgaacggcctggcggtaatcaagcacttcatccccggtctgctgcagcagccagagtaaatccggcgcttcgagcgggtcgatttgcatgactttgagatcgtaaatatggcgagactctagcacatattgctgcccggtgtatggattctcattgtggccgagaaaattgtttagtagttcaaacggccgcaccgccgggttaaccaccaccgctggcagcataaagcactgcgaaagccaggtcgcgtagtagccgcccagcgacgatcctacgacccccagcggctcgcctccgtgctccagcacgatggactccaacagctccgccgtttccgccgggtaaggcggcaactccggcaccaccatggtgatctctggatagtgctgcgccagccaggtctttaacgccgtcgccttcgccgagcgcggagagctgttaaagccgtgcagataaaggagcgtcgccatcagtagccttctgaagcaatatccggatgaaacgcggcgccttccaggcggcacacttcggtggtcagcgtcccgtcagggtgaagctccagccagcgccagcccggtgacaccgtatccagagtgaaattggcacagtgcggtttaaactggacgcaggtcgacggcgtcgccatcatgcgccggccattccagtcgagatccagttcctgatgaatatggccgcacaaaagatgcttcacccgcggccaggcgctcaacgcgctgtccagcgcgccggcattgcgcagactatgctgatccagccagctgcagccggccggcagcggatgatggtgcagcaggagtaaggtatagcgctccggcgcctccgccagcttatgttcgagccactccagctggaagtcgctcagctcgccatggggaacgccaaacacctggctgtcgagcagcaggatctgccagcgatcgccgagaaacacgcgcttggcaggggaaatgcccgcctcctgcagggtgctgtacatcgccggctggaaatcatggttgcccggtagccagacgcagggtgcagcaaaactcgcgatgccctcagcaaaatgctgataggccgcggaggagtggtcctgcgccagatcgcctgttgcgacaatcagatcgcatggacgctgtgaggcatgaatggccgacagtacggcctgatagctatcccaggtattgatgcctaacaacgtctcatgcttttcagcaaacaggtgagtatcagtaatttgtaatatcctgactctggcctcaccagccagaggtaggtttaacaggctttccaaatggtgtccttaggtttaacgacgctaacaaaccggaatcgccatcgctccatgtgctaaacagtaacgcagccagtcggccaaaaactggttaatttgatgcttttcgtcgcgttgatgcaactttttattaggataatcatatcgcgctttgaagcgaaagatctgctgactcgaacacacttcggccaccatggcgtcatggtagaggcggacggtcatcgatggcaggctccagtagctcactgcaggcagagtctgctctattgccaccagagtagtgtagcgggtcgattcaactatcgttaaccgatactgcgcgcttcccacctgatagcttaccttctcacccgctgcatccgttcgcggcaacaggcggcgcaactgcgcgaagttggtctcgcacaggcgcatcatctcagggaagtcaggtgtataacgcttcattttgtccactcatttcgtaaattgtgataatgcaattgcagccattgcaaggcgatgacagaggctgcgttgtcgattttcccctcttctacccactggtaagcctgctcccgactcaccacatgcacccgaatatcctcgttttcctcggccaggccgtgaatgccttttgccgtcgatgcatcaacttctcccaccaggatcgataaccgttcgctggtgccgccgggactggccagatagcttaatattggtttcgtccgcccaacttcaagcccggcctcctccagcgcttcccgacgggcaacatcttccaccgtttcacccgcttcaatcatgccggcgaccatctccagcaaccacgggctctcgctggtatcataggcggcgatacggatttgttcgaccagcaccacttcgtcgcgcaccgggtcaaagggtagcaagacggcggcgtgcccgcgctcaaaaatttcacgggtgatttcgccactcatgccgccgttaaacaggcggtggcgaaaacggtataaatcgagcgaaaaaaaaccacgatatagcgtttcgcgtgcaataatttctacatcatttttggagaaggtaattccctgctgcgtgggtttgctcattgtcatgtcctgcgaatctgaaattagggatttccaaaccgtttggctaccgttttacggtccgtatgttagattggtgcaaattaccgccggatggcacgtaacgccaactttttacggcggcagaatcgatacaatcagcggaatttttcttagaattagaccagcgctaaatgcttcacaacaaggaatgcaaatgaagaaattgctccccattcttatcggcctgagcctgaccgggttcagcgccatgagccaggcggaaaacctgcttcaggtttaccagcaggcacgcatcagcaaccccgatctgcgtaaatcggcagccgatcgtgacgccgcgttcgaaaagatcaacgaagcgcgcagtccattactgcctcagcttgggctgggagcggattatacctataacaatggctatcgcgacagcaacggcatcaattcaaacgtcaccagcggctcgctgcagttaacgcaggttctgtttgatatgtcgaaatggcgcgccctgacgctgcaggaaaaaacggcagggattcaggatgtcacgtatcagaccgatcagcaaacactgattctgaataccgcgacggcctattttaaagtgctggccgccatcgacacgctttcctataccgaagcgcagaaacaggctatttaccgccagttggatcaaaccacgcagcgctttaacgtaggcctggtggcgatcaccgacgtgcagaacgcccgttcacaatacgatgccgtgctggcgaacgaagtcaccgcgcgtaacgatctcgacaacgccgtcgaagaactgcgtcaggtcaccggtaattactatccggagctggcctccctgaacgtgaatggcttcaaaaccaacaagccgcaggcggtcaacgccctgctgaaggaagcggagaaccgcaacctgtcgctgctgcaggcgcgtctgaaccaggacctggctcgcgagcagattcgccaggcgcaggacggccatttgccgacgctcagcctatccgcgtcgagtgggatatcgaatactagctacagtggttcaaaaacccataataatcctcagcaataccaggataacgatgccgggcagaaccaaatcggcctgaacttctctctgccactgtatcagggcggcgcggtgacctcgcaggtcaaacaggcgcaatacaacttcgtcggcgccagcgagcagctggaaagcgcccaccgcagcgtcgtgcagactgtgcgttcatcgtttaacaacgtgaacgcctccatcagcagcatcaacgcctacaaacaggcggtggtctctgcgcaaagctccctggatgccatggaagctggctactcggtgggtacgcgtactatcgttgacgtcctcgacgccaccactacgctgtataacgctaagcagcagctctcgaatgcgcgctacaactacctgatcaacgagctgaacattaagtcggcgttaggtaccctgaacgagcaggatctggtcgccctgaacaacacgctgggtaaacccatctccacctccgcagatagcgtcgcgccggaaaatccgcaacaggatgccaccgctgatggctacggcaacactaccgcggcggtgaagccggcgtccgcacggaccacccagagcagcggcagcaatccgttccgtcagtaattctcatactgtgatgcgcatcgcctgtccgtcggacaggcgatgcgttaaacgtaaggcaacgtaaagatcccccgcttagcgcccctcttcgcttcattttccaccactcatcctctatcctgagcgttaacacacgccataccactgggtcctggaagacaaatatgaaacggacaaaaaatattaatcattcgtcgttccgcaaaagctggagcgcacgccatctgacgccggtcgcgctggccgttaccgcggtctttatgctcgccggttgtgaaaaaagcgacgaaacggtgtcgctgtaccagaacgccgatgactgctccgccgccaacccgggcaaagcagccgaatgcaccacggcctacaccaacgcggtaaaagaggcagagcgcactgcgccgaagtatgccacccgcgaagactgcgtcgccgagtttggcgaaggccagtgccagcagacgccagcccaggcgggcgtcgccccggaaaaccaggcgcaggcgcaaagcagcggcagcttctggatgccgctgatggccggctacatgatgggccgcctgatgggcggcggcatggcgcaacagcagccgctgttcagctcgaaaaatccggccagcccggcctacggtcagtacactgacgccagcggcaagagctatggcgccgcccagccgggccgcaccatgaatgtgccgaaaaccgcgatggcgccgaagccagccaccaccaccaccgtcacccgcggcggctttggcgagtcggtagcgaaacagtcgaccatgcagcgtagcgccgcaggctcaacgtcctcttctcgctcaatgggcggctaagcaacatggaaagagtcagtattaccgagcgcccggactggcgcgagaaagcgaccgagtacggtttcaacttccataccatgtacggcgagccctactggagcgaagaggcgtattacaagctgaccctcgcgcaggtggaaaagctggaagcggtcaccgctgagctacatcagatgtgcctccaggtggtggaaaaagtgatcgccagcgatgagctgatgaccaaattccgcatccctaaacacacctggggttttgtacgtcagtcgtggaaaaccaaccagccgtcgctctactcacgtctcgacctggcctgggatggcgtcggcgaaccgaagctgttggagaacaatgccgacaccccgacctcgctgtatgaagcggccttcttccagtggatctggctggaagatcagctcaacgccggcaagctgccggcgggcagcgaccagttcaacagtttgcaggaaaagctgatcgatcgcttcggcgagctgcgcgagcagtttggctttcagctgctgcatatggcctgctgccgcgataccgttgaagatcgcggtaccgtgcagtatctgcaggactgcgccgctgaagcggggctggcgacggaattcctctacgttgaagatatcggcctgggcgaaaaaggccagtttaccgatctgcaggatcaggtgattggcaatctgttcaagctctatccgtgggagtttatgctgcgggagatgttctccaccaagctggaagacgctggcgtccgctggctggagccggcgtggaaaagcattatctccaacaaggcgctgctgccaatgctgtgggagatgttccccaatcaccctaatctgctggcggcctacttcagcgaagatactcacccggagatggagaagtacgtcattaagccaatcttctcccgcgaaggcgctaacgtgtcgatcgttgaaaatggcaaagtggtggaggcagtagaaggcccgtacggggaagaaggcaccatcgtgcaggcgttttacccgctgccgaagtttggcgatagctatacgctgattggcagctggctcatcaacgaccagcctgcagggatcggtattcgcgaagaccgggcgctgatcacccaggatctgtcgcgcttctatccgcacattttcgtcgaataatgccgcgctccggcgacggtaaatgccgccggagcgcgctatcatcaggcgccaaccaacaccgacagcatgctcagcgagcccatctcgatgccatcgaccgggatcgtcatcgcctcaacgccatcccacgtccccaggacatacagcagcggcaggaaatgctccgccgtcgggttggagagcgagcccccttcgtgtgccaggtagttaaccagcgggtgctgctcgtccagcccctgccattgcagattcgccttcacgtagttattgaaggactctgcccaagggtacggcgtgttctcgccatgccagcgggcggtgcgcaggttatgcaccacgttgccgctggccaccagcataatgccttcatcacgcagcgaggccagcttccgccccatttcgagatgccaggccggcggtttggtgctgtcgatgctcaactgaaccatcgggatatccgcctgcggatacattttaatcagcacgccccacgagccatggtcaaatccccaggcttctgtatcgagggtgaccggcaccggcgagagcagctccaccagccgttgcgccagcgccggagagcccggcgccggataatgcgtgtcatacagcgcctgcggaaaaccgccgaagtcatgaatggtcttcggcgcctccatcgccgttacgcccgtaccgcgcgtaaaccagtgcgcagagaccaccacgatcgctttcggacgcggcagggtttcgcccagttgagcccaggcgcgggtataacggttgtcttccagcacgttcattgggctgccatggccgagaaacaacgcgggcattcgggtacgggacatgatgatatccttagggtgtcaatgtgatgtgctcacattacgcgcttttgcgccaggataaactcagataaccatgatgatgatcgtcagaaaatttgaatgtaattcgcggtaaagggacgtgtcccgtacgcgcatcctcaggcaatatactcgtatgtaattattttcacagggagagaagcgatgtcatcacccttaatattgacgctgttagccggtagcgcaaccttcattggcgccatattcggcgtgattggccagaaaccctctaaccgcctgcttggcttctccctcggctttgccgccgggattatgctattgatttcgttgatggaaatgctgcctgccgcgctggccgccgagggcatgtcgccgctgctcggctatggaatgtttgttgtcggcctgctgggctactttggccttgaccgcctgctgccgcacgcccacccgcaggatctgatgactcccgccatgccgcgcccgcgcaacttacgccgcaccgctattcttttgacgctggggatcagcctgcataactttccggaagggatcgccacctatgtcacggccagcaacaacctcgagcttggcatgggcgtcgcccttgccgtcgccctgcacaatattccggaaggactggcggttgccggaccggtgtatgccgccaccggctcgcgcagcaaagcggtgctctgggccgggctttccggcatggcggaaattttgggcggcgtgctggcgtggttgattctggggagcctggtctcgccgctggtgatgggcgcgatcatggctgccgtcgccgggattatggtggcgctgtcggtcgatgaactgatgccgctggcgaaagagatcgatccgcaaagcaatccaagctacggcgtcctgtgcgggatgtcggtcatggggctgagcctggtggtactccagacgatgggcatcggttaaagcgcagaaacaacacagcccactaacaagtgggctgtgctcgggcgtagcgaaccgctatttagctggctttacgctcatgttcgcgacgataggccaccagatcttcaatcgtgactaccgccatattgtgctgctgagcgaacttgatgcactccggcgcgcgggccatggtgccatcgtcattggtcaactcgcacagcacgcctgccggtttaaagccagccagggtcacgaggtcgatagtggcttcggtgtggccgccgcgggtcagtacgccgcccggctgcgcacgcagcgggaagacgtgaccaggacggttgagatcggaaggtttcgcgccgtcggcgatggccgcgcggacggtggtcacgcggtcggcagcggagacgccggtggtcacaccttcggccgcttcgatggtcacggtgaagccagtgccgtaggcgctggtgttgttctctaccatcatcggcagatccagctgtttgcggcgttcttcggtcaggcacaggcacacaatgccgctgccgtgacgaatggtcagcgccatctgctcaacggtcatggtttcggcggcgaagatcatatcgccttcgttttcacggtcttcatcatcaagcaccatcacgccgcggccttcgcgcagggcgtccaaagcgtgttccacacgttcaaaagcggtaccaaaagaagaaaggagcgtctgattcatggtaaaaaaacctcattaaaattatggttaccagaatcagggcagtcttaggagcgccggtttagcggcaaaagtcaacgcgagcgggcctgggcccgactgtgccgttactctctcccatccggactttaaccgtcggccccggaattacaccggatctgctgaccttcccgtagtcacgggaagcgctcgcgggctttcaacgccatggttgatttaccgccggtggggaatttcgccccgccctgagaataagcgagataactataacgctattgactatcctcggcaatgcataagcttcaaacatttctggtttataggcggcctggttcgcactacaatgatcaatcatccgacccgagcaggaaaccaccatgattgacccgaaaaaaattgaacaaatcgcccgccaggtccatgagtcgatgccaaaaggacttcgcgatctgggtgaggatgttgagaagaaaatccgccaggcgctgcagtcgcagctgacccgtctggatctggttagccgcgaagagtttgacgtgcagactcaggtgctgctgcggacccgggaaaaactggcgctgctggagcagcgcctgaatgacctcgaaaaccgcccggcggcgacgccgggcagcgaagagcagcagtaaaaaacgggcccctgggggcccgttttgcgtttggcttaatgggcggcttccgcctgactactcacctggcgacagtacagttcatagcgctggcaaaaccattcacgatgttcttcatccatattgccgacaatggcctgaagatcaactggctggccctgggcgtgcattctggcgaaactccgcgccaaaaaatcaaaattcttcattgaatacatatcgttatggttcatgcgcatactccttcagcggtggatgttctgatcagtcatatgccttttactcacttcagtatttacgcttaccttaacgcgatttgtacgaaaaatgcgcttaacatgattatttattgcgctaaatcattttccacatgattaaataaaaacggcccgcgatacgtctatcgcaggccgtgatgcttcaccgtacacaccggtgaatagcgaaaagcttatttgtcgctatctttttgtattttcttaataatattggtagttgagcagccatcttcaaagttgagcaccaacacttcgccaccgttcgcccagacctcttcgctgccggcgatctgctccggtttgtagtcgccgcccttgaccagcagatccggcaggatgccagcgatcaggcgctgcggagtatcttcttcaaatgataccacccagtcgaccgcttccagcgcccccagcacgatcatccgctgttccagcgggttcaccgggcgggtttcgcctttcagacgtttggtggaggcatcgctgttgaccgccacgatcagacggtcgcccagcttgcgcgcattcgccagataggagacatgaccggcatgcagaatgtcgaagacgccgttggtcatcaccactttctcgccgcgtttgcgcgccgccgcaaccgcctgtttgagttcctcttcgctcatcacgccaaagccggtctcagcccggccgcggaccgcgttttccagctcgacaggggaaacggtggatgtacccagcttaccgaccaccacgcccgccgcggcgttagcgaaatagcaggcctcttccagggtgttgccggacgccagggtcgccgccagcacgccaatcaccgtgtcgccggcgccggtcacgtcgtacacttcctgggcctgggtcggcatatgcagcggcggacgccccggctgcagcagcgtcatcccctgctcagagcgcgtcaccagcagcgccgacagttcgaattcggcgatgagcttcatgccgcgctcaacgatctgcgcttcatcctggcacttgcccaccaccgcttcaaactcagagaggttcggggtgagcaacgtcgcgccgcgatagcgttcgaaatcggtgcctttcggatcgatcagcaccggcacgcccgcttcgcgtgcgagtcggatcatggtctggacgctggtcagcgcccctttggcatagtccgaaaggaccagcgcgccaatagagcccagcgcctgctgaatgcgctcgtgcatcggctgcggatcgacgccggagaagccctcttcaaagtcgaggcggatcagctgttgattgcgcgacagcacccgcagcttggtgatagtcgggtgagtcgggacggagacgaagtcgcacttcacattgacgttggccagcgcctggctcagcgcgcgggcggcgtcatcaatcccggtcaatcccaccaggcgcgaggttgcccccagcgaggcaatgttcatcgctacgtttgccgcgccgccaggacgttcttcgatattttccaccttcaccaccggcaccggggcttccggggaaatacgactggtggggccgtaccagtagcggtccagcatcacatcacccaccaccaacactcctgcacgttcaaactccggcagcgttactttcatgactctctcctgcgagacgcaaactttgcgcgcgataatagcacacccgattttatagttaagccatcagccatttctgccagctggcgctgacctgctcgcgctcccggctgaaggcctctggcgccacgtgtcccggcagctcctgcagggccaggtgatggagcgcgtcacgcaaggtggtgtacgcgtgcgttaaggcgcgcgcttcctcctcgtccatgatgtcgttctgcgccagcagctcgagaatacgcacattatcagaccagcgggtcagcttcggcttgtcgctggcatagcgtaggaccagatactgggtaataaattcaatatccgtgatcccgccggcatcggctttgatatcaaaacgattgggatgcttgttgccgaggtgggcgcgcatcttctcgcgcatctcgcgaacctcggtctgcagggttgcgccctcccgcggggtggtcaggatatcgcgacgaatggcgtcaaagcgcgcctgcaacgccgggtcgccatagaccacgcgggcgcgcaccagcgcctgatgctcccacgtccaggcctcgttctgctgatagtcggcaaacgcgtcagcggtggtaaccagcatccccgccgcgccggaagggcgcagccgggcgtccacttcgtagagaataccggacgaggtgcgggtgctgaacagatgcatgatccgctgggccagccgcaggtagaactgacggccgtcaatctcccgctcgccgtcggtcatcacctccgccggacagtcatggaggaacaccaggtcgagatctgagctgtagcccagctcccaaccgccgagcttgccgtagccgacgacggcgaagccgcgcccctggcgatcgtgcagatgggtcggcaggccgtagcgagccaccatctgcccccatgcctgctgcaccaccgcatcgaggatcgcttcggcaagccaggttaaatggtcgctgaccttcatcaccggtagggtgccggcgatatccgccgccgcgatatgtagctgctgcgcctgcttgaactggcgcaacgcctccagctgctgctcttcatcctcttccggcacccgcagcagatactgacgcagctcgtcgcgataggcatcggtcgccgtcggctgatagagggtgttgggatccagcagctcatccagcagcagcgggtggcgcgccagctggctggcgaccatcggcgatgccgcgcagagcgtaatcaggtgtttcagcgcgccggggaattcgctcagcagttcaagataggtggtgcgggtgacgatgccggtcaacagcggcgtgatccgcgccagaggcagcggcgcatcggcgcgcgagcagatttcgctcaacagatgcggcatcagctgatccagcacctggcggccgcgcgggccgatggtgcgccgatccagctctttgcggaaatcggcaatcagcgccagcacgctgcggcggtcggcgtcgtttaaatgcgccagcgccggactggcgtcatcttcttccagcgcatcctgccacagctcgcgccagtactcggccagctgctcatctggcgactgagcctcgtcatcgccgatcagttcattaaacacccgccgtacgttggccatatggttcgccagctgcgcgctcagcgtctcccagtcatcggtatgcatcccccacgccagtctggcgcggttcagttcatcctgcggcagggtctgggtctgttcatcgttgatactttgcagcaggttttccagccggcgcaggaacagataggccgcgcgcagcagcgtcgcgtcgccttccggcagcagatgcagctcatcaatcgccgccagtgtcggcaatagcgcgcgctgctgcagcgcaggttcgcgaccgccgcggatcagctgaaagacctgaacgataaattcaatttcacgaatgccgccggcgccgagcttgatgttgtctttcagcccgcgacgccgcacttcacgggcgatcatgcctttcatgttacgcagcgactggatcacgctgaagtcgatatagcggcggaagacgaaggggcgaagcatcgcgcgcagttcgctggcgtaggcgccgtcgttatcgcccatgatccgcgctttcaccatcgcgtagcgttcccagtcccgcccctgctcctggtaataatcttccagcgccgcaaagctgagcaccagcggcccgctgtcgccaaacggccgcaggcgcatgtccacccgataaacaaagccgtcctgcgtcggctggtcgagcgccttgataagccgctgccccaggcgggtaaagaactgggcgttatccagctcgcggcggccgccgcgggtggcgccatgctccggccaggcaaagatcagatcgatatcggaagagaagttcagctcgccgccgcccagctttcccatcccgaggatcagcagcggctgcggctgaccctcggcgttgcatggcgttccccactctttacagcaggcggcgtacagccagtcgcgggcggcgacaatcagggtctccgccaggacgctcagctgctgcagcgtctcttcttcgcgcaccagcgacaacgcctgcgcccaggcgatgcggaccatcatctggcggcggaagagacgcagctctcgcatcaaccccgcttcgtcagtgacggcctgcaggcgctcctgcagccaggcttcgtaatgccgccactcttccgccgccggcgcggagtccgcaagctcattcagccagcccggctgagcgatcacactctgttcgacaaaatcgctgaacgccatcaccgacctggcctgtgggctcagttcggcaacgggaaaatccgctggcagacggtcagcgaccgtctgccagtgctgctgtaactgcggagaaagcggcatcataagggctccctggcctgtaattatcgttttccactatgcagccagaacggctcggcagccagcgcctggcgacggaaatattcaaacacgctgcggtcgtcatgctctatcgcacgctgaagttcctgccagttctccagccacggcgcgacggcgtcgccataggcgcccgccagcagctggacgctgtcgatgtcgcgggacagcttcggcaactggtcagcggcatcttctaccgccagatgctgcacggcgctgcgcagctcggccgccacccgcgagaggtgaatatcggcaaaccgtttgaacgagccggctatttttttctctcccgcctcgttgaggaacggacgccacccgcgctggaccagccattcggtcagggccagtttggcgccaacgacctcggtgcggaataacgcttcgtcggcggtgtccgcagccagcagaacggcgtcggcgtcgttcagcaacgcgcggaggtgggtggtcgccttacgcggcacgatgccgccaaacagcacgagggcatggcgcacgcgggctatcgccagcagaatttccgctttggcttttgcgttgccgcgcagccagatctcgtcgtgatatagccagtgcgccagggcgctctccagcgccgcctccagcccctgctccacgctggccttcgctgccaccggcagcaccgccagccgggtcaccggacgctcattgttaccttgcgccagatgatacccgcgcgcggctttgctcaggctcccctgacgcaggacgccgctctccagcaaacgatgcgcgaggcgtagcagatcggcggtctccccggcgagcagctccagctccagttcgcagatcggctcctgatgttcgcccgcctttacttcgccgcgatcgagggcaatctcaatctcactctttccttcctggatcacccagcgttcacgggcaaaatcggtgctgaacagcggctggacatgctccgccagcgcggccggaagttccccttgcggccagacctccgccggcaggcgctcaagcgccagctccggtttagccaatggaatattatattccgggcgctggtgcaggccgccgaccacccgaccggcgattttcagcgtcatctcataacgcccctgatcgccgcggatgcgcagccccatatcgtgacgacgcagccagttatcggcggtttcgtaataaatgttcagcaactggcccgcgggcgtatgtttcgcctcgagcgcattgagctgctcgcgcagcgtctctaccccatcctgagcgacgataaacttgagttcgatttcttgagccatgactgaattcttccgcttctgtgctgcgccgacaaattgcggcgaacttacgacaatattttttgtcagtagatagtattttgcggtgaatcgccatgcaacgcgctttttgccgggccacctcctggatgattccgattgtggcggaaaactttgcgtcgctctggcgatgcctctactatcgttccactttttatgaccaaacgatgacctgatgccaaaattacgcctgattacttttactttgctcgcgcttagcgccgccacggcggttcacgcagaagaaaagcgctacgtttccgatgagctgaacacctgggttcgcagcggcccgggcgataattatcgtctggtcggcaccatcaacgccggggaagaagtgtcggtactgcaaacgaacgacagcaccagttacgcgcaaattcgcgacagcaacggccgtaccgcctggatcccgctgaaagagctgagcaacgagcccagcctgcgcacccgcgtcccggatctggaaaaccaggtcaaaacgctgaccgataagctgaataacatcgatgccacctggaaccagcgcacggcggatatgcagaagaaagtcgccggcagcgacagcgtgattaacgcgctgaaggacgagaaccaaaagttgaaaaacgagctggttgtcgcgcagaagaaggtgaatgcggcaaatctgcagcttgatgataaacagcgcaccattatcatgcagtggtttatgtacggcggcggtgtgctgggcgtcggtctgctgctcggtctggtgctgccgcatctggtgccaagccgcaaacgcaaagaccggtggatgaactaattcgtcttctctgccagacttacgtatcatcttgcgaaaaacggatacgggagaatcaggcgtgaagagttatctggtcggtggcgcggtgcgtgacgcgctgttagggctgccggtcaaagaccgagactgggtggtggtgggcgccaccccgcaacagatgctagacgcgggctatcaacaggtaggccgcgattttcccgtgttcctccatccgcaaagccgggaagagtatgccctggcccgcaccgagcgcaaatccggcgcgggctataccggttttacctgctatgccgccccggacgtcaccctcgaagccgatctgctgcgccgcgacctgacggtcaatgccctcgcccaggatgccgacggcgcaattatcgacccctacggcggacagaacgatctccgtaagcgcctgctgcgccatgtctctcccgcgtttagtgaagatccgctgcgcgtgctgcgcgtcgcgcgctttgccgcccgctacgcccacctcggttttcgcattgccgaagagacccaggccctgatggccgcgatagttgaggccggcgagctggcgcatttaacgccggagcgggtgtggaaagagacggaaagcgcattaactactcgcaacccgcaggtctttttccagacgctgcgcgactgtcaggccctcaaggtgctgttcccggagattgacgccctgtacggcgtgccggccccggcgaaatggcatccggaaatcgataccggcctgcacaccctgatgaccgtcacgatggccgcgatgctgtcgccggatgtcgacgtacgtttcgccaccctgtgccatgacctcggcaaagggctgacgccgaaggcgctctggccgcgtcaccacggccatggtccagcgggagtcaagctggtggagcagctctgcgcgcgtctgcgggtgccgaacgatatccgcgatctcgcgaaactggtggcggagtaccatgacctaatccacaccctgccgattctgcagccgaaaaccctcgtcaaactcttcgacagcattgacgcgtggcgcaaaccgcagcgcgtgcagcagatcgcgctcaccagcgaagccgacgtccgcggacgcaccggtttcgaggccagcgattacccgcaggggcgcctgctgctggaggcctgggaagtggcgcagtcggtctccactaaagaggtcgtggcggcgggctttaaaggggcggaaattcgcgaggagctgacgcggcggagaattgcggcggtagcgcagtggaaggaacagcgttgcccccagccgcaaggctgagggcgcaggccttagaagaagaccacgtacaccgctgccgcgacgataaagcggtagatagcgaacggaatgaacgagatccgtttgatcagctgcaggaaggttttaatcgcaatcagcgccacgataaacgccatcacgaagccgacggcgaacatcgggacatcgcccatgttcaggaagccgatgctcttgtagacgtccagcacggtggcgcccatcatcatcggtaccgccagcaggaaagagaactccgaggccgcatagcggctgacgcccatcagcatgccgccggagatagtcgcccccgagcgggagaaacctggccacagcgccaggcactgaaagcagccgatgacgaacgcctgacggtaggtcatatcgtcaatcccgaccgcgcgcggctgtttcggcttcagcacttccgctgcaatcagcaatacgccgccgacaatcagggcgtacatcacgttcaccgggttaaacaaggatttaatggtgtcatggaaaatcagccccatcaccaccgcggggatcatgccgagaaggatatggataagcgacaaacggccgctgccctggccttcatgcgccggcggtttcccgaaatggatgccgatcaggccgaacaggcgacgccagaacatcaccaccacggcgagtatcgaacctaactgaatcaccacttcaaaggtatttgcggtatcaccttcaaaccccagcaggtgaccaacaataatcatatgaccggtactggaaacaggtaaaaactctgtcaaaccctcaaccacacccaatattgccgccaccagcagcgagtgtatatcgctcatccaattaaaccctttaaaaaagtaaaatgaaaaaaaccaggaacacggtatcgttcaacaggcacaacccggctgccagagcgcgcgtaatccgcagcgtacagtaagtacacacggattcgtccaccgttctggaaggacatcgccagtaaaattgcctgatgaccggatgctatgaccggtataaacgcaatttgtttaacaagtatgacctgaaaagttttgtttcagattaaggccacgttcaataatcaccccgacgtttgccgcgcgagccacggcgccaggtttgctgacttttatgcgcacccatggcgactggaatgtttccagcagcaggtcggccacctcttccgccacccgctccactaacgcaaatttccccccctccacatgcgcgatcacgcgctcgctgatatcagcatagctgaggcaatcgctgacatcatcgctggcggccgccttgcggttatcccatgcaatttcgatatcgaacaccagcttctgctcaatggtttgttcccagtcataaacaccgatggtggtgattaccgaaagttgctctataaatacaatatccatcacgccctgcctgctttttagctaaaccggataccacttccggcgaattatgcgtattatccacagatgcagagaatacaacgacattttcaaaacggaacagcgttatgagtgcaatcgcgcctggactggtactcctcgcctacctctgcggctccatttccagcgccattctggtatgtcgccttgctggcctgcccgacccacgcgacagcggctcaggcaaccccggggccactaacgtactacgaattggcggaaaaggggcggccgtagcggtacttatttttgatgtgctgaagggcatgctcccggtgtggggcgcctgggcgctgggccttacgccgttctggctggggttagtggcgattgccgcctgcgtgggccatatctggccagtcttctttcatttccgcggcggtaaaggcgtcgccacggccttcggcgctatcgcccccatcgggctcgatctcaccggggtgatggccgggacctggctgctgaccatcctgctcagcggttactcttccctgggcgctatcgtcagcgcgctgatcgccccgttctacgtctggtggttcaaaccgcagtacacctttccggtgtcgatgctctcctgcctgatcctcctgcgccatcacgacaacattcagcgtctgtggcgccgccaggagagcaaaatctggacccgcgagaagaagaaaaaaacgccagagcagaagtaatctcccctcccggctccgccagccggggaactcccctgcgctaatcgcgcctttcatccgcccttttacgcttcctcgccatcaaaggcgatcatcgccacatcctccttttgtaacaatacgttagcagcatggaaaggcaaaagttgcgctggcggctggcggcgcggcgcaacccgatccgccgccttttccgccgcgcccaggctgcggatcaggatattgacggcaaagattatccgggtgaataatccggagcggttatgccgctttcccctcgcgcccgtcgcgacgctccgggttacggatgacataagcgtttcgtatgaccgggataaactcccgccgatcaatactcattgctgctgttttatcttgattttgcaggggcgcaacattgcacggcaccgtgttaccaccactcaaaaaaggctggcaggccacgctggatctccgctttcaccaggccggcggcaagaccgttctcgccagcgcccaacacgtcggcccgctgaccgtccagcgcccgttttacccggaagaagagacctgtcacctctatctgcttcacccgcccggcggcatcgtcggcggtgatgagctgacaattagcgcgcaccttgcccccggctgccatacgctgataaccatgcctggcgccagcaagttttaccgcagcagcggcgcgcaagcgctagttcgccagcagttgacccttgccccacaggcaaccctggagtggctcccgcaggatgccatcttctttcccggggcgaatgcccggctgttcactacctttcatctttgcgcctccagcaggctgctggcctgggatctgctctgccttggccgcccggtgattggcgaaaccttcagccacggcaccctcagcaaccggctggaggtatgggtggacgatgagccgctgctggtcgagcgcctgcagctgcaggagggagagctctccagcgtcgccgaacgtccctgggtcggcactttgctgtgctatccggctaccgatgccctgctcgacggggtgcgcgacgcgctggcgccgctcggtctctacgccggcgccagcctgaccgaccgcctgctgacggtgcgtttcctcagtgacgataatctgatttgccagcgggtgatgcgcgacgtatggcagtttctgcgccctcatctcaccggtaaatctcccgtacttccccgaatctggctgacttaagagaacgttatggaactgaccccccgagaaaaagacaagctgttgctgtttaccgccgcgctggtggcggagcgtcgcctggcccgcggcctgaagctcaactatccggagtccgtggccctcatcagcgcctttattatggaaggcgctcgggacggcaaaagcgtggcctcgctgatggaggaaggccgtcacgtcctgacccgcgagcaggtgatggagggcgtcccggaaatgatcccggatatccaggtcgaagccaccttcccggacggctcgaagctggtcaccgttcacaacccgattatctgaggtagcgccatgatccccggtgaatatcacgttaagcccggtcagatagccctgaataccggccgggcaacctgtcgcgtggtcgttgagaaccacggcgatcggccgattcaggtcggttcgcactaccatttcgccgaggttaacccggcgctgaagttcgaccgtcagcaggccgccggctatcgcctgaatatcccggcgggcacggcggtacgctttgaacccggccagaaacgcgaggtcgagctggtggccttcgccggtcaccgcgccgtcttcggcttccgcggcgaggttatgggccctctggaggtaaacgatgagtaatatttcacgccaggcctatgccgatatgttcggcccaaccgtcggcgacaaggtgcgcctggcggataccgagctgtggatcgaggtggaggacgatttgaccacctacggggaagaggtcaaattcggcggcggcaaagtgatccgcgacggcatgggccagggacagatgctggccgccgactgtgtcgacctggtgctcaccaacgcgttgatcgtcgatcactgggggatcgttaaggccgatatcggcgtgaaggacggccggatcttcgccatcggcaaagccggcaaccccgacatccagcccaacgtcaccatccccatcggcgccgcgacggaagtgatcgccgccgaaggaaaaattgtcaccgccggcgggatcgatacccatattcactggatctgtccgcaacaggcggaagaggcgctggtctccggcgtgaccaccatggtcggcggcggcaccggcccggccgcgggcacccatgccaccacctgcaccccgggcccgtggtatatctcacgcatgctgcaggcggccgacagcctgccggtcaatatcggcctgctgggcaagggcaacgtttctcagccggatgccctgcgcgagcaggtggcggcgggcgttattggcctgaagatccatgaggactggggcgccaccccggcggcgatcgactgtgcgttaaccgtcgccgatgaaatggacatccaggtcgccctgcacagcgacaccctgaatgaatccggatttgtggaagacaccctcgccgccatcggcgggcgcaccatccacaccttccataccgaaggagccggcggcggccatgcgccggacatcatcaccgcctgcgcccacccgaacattttgccgtcgtccaccaatccaacgctgccctacaccctcaacaccatcgatgaacatctcgatatgctgatggtctgccaccatctggacccggacatcgccgaggacgtggcctttgccgagtcgcgcattcgccgggaaaccatcgctgcggaagacgtgctgcacgatctcggcgccttctcgctcacctcctccgattcgcaggccatgggccgcgtcggagaagtgattctccgcacctggcaggtggcgcatcgcatgaaggtgcagcgcggagcgctggcggaggagaccggggataacgacaacttccgcgtgaagcgctacatcgccaaatacaccatcaacccggcgctgacccacggcatcgcacacgaagtcggatccattgaggtgggtaagctggctgacctcgtggtctggtcaccagccttcttcggcgtgaaaccggccaccgtgatcaaaggcggcatgatcgccatcgcgccgatgggcgatatcaatgcctctattccgaccccgcagccggtgcactaccgcccgatgtttggcgcgctgggcagcgcccgccatcactgccgcctcaccttcctgtcgcaggcggcggcagccaatggcgttgccgagcggctgaacctgcgcagcgcgatcgccgtggtgaaaggctgccgtacggtgcagaaagccgacatggtgcacaacagcctgcagcctaacatcaccgtcgacgcccagacctatgaggtgcgggtggatggcgaacttatcaccagcgagccggcagacgttctgccgatggcgcaacgatattttctgttttaaggagagcggatgctttatttaactcaacgtctggagatccccagcgccgcgaccgccagcgttacgctgccgattgatgttcgcgtcaaaagccgggttaaggtcaccctcaacgatggccgggaagccggcctgctgctgccccgcggcctgctgctgcgcggcggcgatgtgctcagcaacgaagaaggcaccgagtttgtgcaggtgattgccgctgatgaaggggtgtcggtagtgcgctgcgacgatccgtttatgctggcgaaggcctgctaccacctcggcaaccgtcacgtgccgctgcagatcatgcctggcgagctgcgctaccatcacgatcacgtgctggacgatatgctgcgccagttcggcctgacggtgacctttggccagctgccgttcgagccggaagccggcgcttacgccagcgagagccacggtcatcatcatgctcatcatgaccaccacgctcacagccactagcatgtcgacagcggaacaacgcctgcggctgatgcagctggccagcagcaacctgccggtagggggttacagctggtcccaggggctggagtgggctgtggaagccggctgggtgccggacgtcgcggccttcgagcgctggcagcgacgccagatgacggaaggcttttttaccgttgacctgccgctgttcgcccgcctgtaccgcgcctgcgaacaaggcgatatcgctgcggcccagcgctggaccgcctatctgctggcctgccgggaaactcgtgaactgcgggaggaagagcgcaaccgcggcgcggcgtttgcccgtctgctgagcgactggcagccggactgtccgccgccgtggcgctccctgtgccagcaaagccagctcgccgggatggcctggctcggcgtgcgctggcgtatcgccctgcccgagatggccctcagcctgggctatagctggattgagagcgccgtgatggccggcgtcaagctggtccccttcggccagcaggccgcccagcagctgattttacgtctttgtgaccactacgcggccgagatgccccgcgcgctggccacgccggacggcgatatcggatcggccaccccgctcgccgccatcgcctctgcccggcatgaaacccaatactctcgattattccgttcctaggagaagccatgaactcttataaacacccgctgcgcgtcggcgtcggcggcccggtcggctccggtaaaaccgctctgctggaagcactgtgtaaagcgatgcgcgatacctggcagctggcggtggtcactaacgacatctataccaaagaagatcagcgcatcctcaccgaagcgggcgcgctggcgcctgaacgcatcgtcggtgtggaaaccggcggctgcccgcatacggcgatccgcgaagatgcctcaatgaacctcgccgccgtggaagcgctgagtgaaaagttcggtaacctcgaccttatcttcgtggaaagcggcggcgataacctgagcgccaccttcagcccagagctggcggatctgaccatctacgtcatcgatgtggccgaaggggagaagatcccgcgcaaaggcggaccggggatcaccaaatccgatttcctggtgatcaataaaaccgaccttgccccctatgtgggcgcgtcgctggaggtgatggcgagcgatacccagcgtatgcgcggcgatcgcccatggaccttcaccaatctgaagcagggcgacggcctgagcaccattatcgccttcctcgaagacaaaggcatgcttggcaaataggcctgttgcaccagccgggcgcaagcgcgtccggatggtgcagcctctgctctctctttatatcatcctgcctccacctccgcgccacgcctgccctgcaatatggcataaggtttgctaattcaagtcatgcctaaccattaaggaatgactatgtcatcactggatcttaaccctgaattacccgcgacaacgcggacttccggctcccgggaaaccttagaagattacaccttacgttacgccccgctgagctttcgccgctggggtccgggcgtcgtcgcggtcaccgcgctgggcggcatcgcctatctggccgacttttccatcggcgccagcatcggtatggcctggggcaccagcaacgccatctattcgatcctggtggcggcgctggtgatcttcctcaccggcattccgctggcgatcactgccgcgcgctacaacattgaccttgacctgatcacccgcagcgccggcttcggctatttcggctcggtgatcaccagcattatttttgccggcttcacctttatcttcttcgccctcgaaggctcgatcatggcccagggcctgctggtgggcctcgggatcccgctgtggatgggatatctgatcgccaccctgatggtgctcccgctggtggtctatggcatgaaagccctgacccgcctgcaggtgtggaccacgccgctgtggctggtgctgatggtggtgccggtggtgtggctgattgtcaaagatccgcagctggtggacggcttcctgcatttcgccggtaaaaacagcgcgtcgacggtggatattaccgccatcatgctcggcgccggggtatgcctgtcgctgatcatgcagattggcgagcaaattgattacctgcgctttatgccgcctaagaccgcggagaatcgtaaaagctggtggctggcggtcttttccgccggcccgggctgggtggtgttaggggcgatcaaacagatcatcggcgccttcctcggcttctatctgttgacccgtttcccggcggtgcacaataccgaaccggtgcagcagttcgtcagcgtcttcgataacctggtgcccggctggctggccctgacgctggcggtggtgctggtggtgatctcgcagatcaaaattaacgtcaccaatgcctactccggctcgctggcgtggaccagcgcctggacccgcaccaccaaacgctatccgggacggattatttttgtggtggtcaacctggcgattgccctggcgctgatggagggcgatatgttcagcgccctgtcgtggatcctcggcttttactccaacttcgccatcgcctgggtcgtggtggtggcgaccgacatcacctttaataaaggcttgctcaagctggcgccggcgcagccggagtatcgtcgcggcatgatctacaacgttaacccggtgggcgtggtctcctttggtctggccgccgggctgtcgatctgcgccttcttcggtctgctgggggcgacgctggcgccgttctcgccgctgattgcgctggtcgttgcctttgtcatgaccccgctgatggggctccttacccgcgggcgctactatattaagcaggtggatgacggcatcgccgagccgcgctatgacgcggcggggaacgcctccaccaccgtgtatcaatgcgttagctgtgaggaagagtacgagcgcccggacgtgatgcactcgcacaagcatcagggagccatctgctcgctgtgtaaaagtatggagtagtcaggaaggcaggccgacgtgacgtcggcctgtttcaggacgcgttaggcggcaggcagctcggccagcggccagcgcgggcgaaccgtcacgccgagctcggctttggcgccggtttgcagacgcaccatgccggcgtaggcgatcatcgcgccgttgtcagtacagaactcagggcgagcgtagaacacctcgccgccgcgtttttgcatcatctccgccagcttcgcccgcagggtacggttggcgctcacgcctcccgccatcaccagacgcttaaagccggtttgctccagcgcgcggcgacatttaatcatcagcgtatcgacgaccgcatcctcaaacgcccgggcgatgtcggcgcgggtttgctcatcgtcgccgttgctgcgaatggtgttggcggcgaaggtcttcaggccggagaagctgaagtccagccccggacggtcggtcatcggccgcgggaagacaaagcggccttcggtgccctgggacgccattttcgacagcatcggcccgccgggataatccaatcccagcagcttcgccgtcttatcaaaggcttcgcccgccgcatcgtcaatcgactcgcccagcagttcatactgaccaataccggtgacgctaatcaactgggtgtggccgccggaaaccagcagcgcgacgaacgggaacgccggcggattatcttccagcatcggcgccagcagatgcccttccatatggtgtaccgggatcgccggcacgttccaggcgaaggccagcgcccggccaacggtcgccccgaccagcagcgcgccgaccaggcctggacccgccgtataggcgacggcgtcgatatctttcgccgtcagaccggcttctttcagcgccgcctggatcagcggcaccgttttgcgcacgtggtcgcgcgatgccagctccggcaccacgccgccgtaatccgcatgcagtttcacctgactatacaattggttggctaacagaccttgctggtcgtcataaatcgcgatgccggtttcatcgcaggatgtttcaatgcccagtacacgcatgagttgttttacctcgcttcaataccgcgcagtgtaggtccaatgaccggcgatgtaaaactttgctcacccctggtgctctcttcgtgtatactcctcacccttataaaagtccctttcaaaaaaggcgccggtgctttacaaagcagcagtagttgcagtaaaattccgcaccattttgaaataagctggcattgcggccagcggcaaaccgaattaatcaaaggtgagaggcacatgccggtaattaaagtacgtgaaaacgagccgttcgacgtagctctgcgtcgcttcaagcgttcctgcgaaaaagcaggtgttctggcggaagttcgtcgtcgtgagttctatgaaaaaccgactaccgaacgtaagcgcgctaaagcttctgcagtgaaacgtcacgcgaagaaactggctcgcgaaaacgcacgccgtactcgtctgtactaatctgttgagagcgacgctctcaattcagaccgagttgtagttgtaaggccgtgcttccgaaaggaatgcgcggcttattttcgtttatagtcatcagaaataacggggcttatggctggacgaattccacgtgtatttattagcgatctgcttgccagaaccgacatcgtcgatctgatcgatgcgcgggtaaagctgaaaaagcagggcaaaaattttcacgcgtgctgtccgttccataacgaaaaaaccccctctttcaccgtcaacggtgaaaaacagttttaccactgcttcggctgcggggcgcacggcaatgctatcgacttcctgatgaactacgacaagctcgagttcgtggaaacggtcgaagagctggccgccatgcacaacctcgaagtgccttatgaagcaggcaacagacccagccagatagagcgccatcaacggcagaacctctaccagttactggatggtctgaatgcgttttatcaacagtctctgatgcagcccgccgccgatcctgcgcgccagtacctggcgaaacgggggttaagcagcgaggtgattacgcgctttgccatcggctatgctcccccaggttgggataacgttttaaaacggtttggcggcaatcaggaaaaccgccagtcgcttattgatgccggcatgctggtcaccaacgatcagggacgcagttacgaccgcttccgcgaacgggtgatgttccccatccgcgataagcgaggccgggtgattgggtttggcggacgggtgctgggcgatgccctgccgaagtatctgaactccccggaaaccgacatattccataaaggccgccagctgtatggcctgtatgaagcgcagcaggataaccccgaaccaccgcgtttgctggttgtcgaagggtatatggacgtcgtggcgctggcgcagtacgacattaattatgccgtggcctcgctgggtacctcgaccacggccgaccatatccagctgctgttccgggtgacgaataacgtcatctgctgctacgacggcgaccgggccggccgcgatgccgcctggcgcgcgctggagacggcgctgccgtacatgaccgatggtcgccagctacgctttatgtttctgcctgacggcgaagacccggatacgctggtgcgtaaagagggcaaagcggcgttcgaggcgcggatggagcaggctcagccgctctccacgttcttgtttaacagcctgctgccgcaggtcgatctgagtactccggacgggcgcgcgcagctgagcacgctggcgctgccgctgataacccaggtcccgggcgaaacgctgcgcatctatttgcgtcaggagttgggcaataagctgggcattttagatgacgcgcagcttgaacgattaatgccaaaacaggcggaaaatggcgcgccgcgtcccgcaccgcagctaaaacgcacgaccatgcgtatactgataggactgctggtgcaaaacccggatctggcgccgttagtcccgccgctggagggactggactcgcgcaaaatgccgggactgagcctgttcagcgaactggtgaagagctgtctggcgcagcctggtctgacaaccgggcaacttttagagcaatatcgcggcacaaaagaggcggcaacccttgaaaaactgtcgatgtgggacgatatagcagataaagacatcgctgaacaaaccttcaccgactcgctcaaccatatgtttgattcactgctggaactgcgacaggaagagttgatagctcgcgatcgcacacacggtttaagcagtgaagaacgccgggagctctggaccatcagccaggagctggcgaaaaaataaatgacagacaatatccttcacgttgtatcaaagcagtaagaaaacgcagaacaacgtgaaggaaaagtatttaacggcttaagtgccgagtatcgatcgggaagcccccgacagccgcgcagaggcgcagcggcaataatataagtacgccctcgctttaaatgtcgacagcccgtctgccgacaccaatcaaacgaattaagtgtggataccgtcttatggagcaaaacccgcagtcacagctgaagcttcttgtccaacgtggtaaggagcaaggctatctgacctatgccgaggtcaatgaccatctgccggaagatatcgtcgattccgatcagatcgaagacatcatccaaatgatcaacgacatgggtattcaggtgatggaagaagcaccggatgccgatgatctgatgcttgccgaaaacaccgcggatgaagatgctgccgaagccgccgcgcaggtgctctccagcgtggaatccgaaatcgggcgcacgaccgacccggtgcgtatgtacatgcgtgaaatgggtaccgtagagctgctgacccgtgaaggcgaaattgacatcgccaaacgcatcgaagacggcatcaatcaggtgcagtgctccgttgccgaatatccggaagcgatcacctacctgcttgagcagtacgaccgcgttgaagcggaagaagcccgtctgtccgatctgatcaccggtttcgtcgatccgaacgccgaagaagatatggcgccaaccgccacccacgttggctccgagctgtctcaggaagagatggatgacgacgaagacgaagacgaagatgaagacgccgacgacaacagcgatgacgacaacagcatcgacccagagctggcccgtgagaaattcgccgagctgcgtacccagtacgagctgacgcgcgacaccatcaaagccaaaggtcgtagccatgccgccgcccaggaagagatcctgaagctgtctgaagtcttcaagcagttccgcctggtgccgaagcagttcgattacctggtcaacagcatgcgcagcatgatggatcgcgttcgtactcaggaacgtatcatcatgaagctgtgcgttgagcagtgcaaaatgccgaagaaaaacttcatcaccctgttcaccggcaacgaaaccagcgagacctggttcaacgccgcggtggcaatgaacaagccgtggtctgagaagctgctggaagtgaaagaagatgtgcagcgcggcctgcagaagctgcagcagattgaagaagagaccggcctgaccatcgagcaggttaaagatatcaaccgtcgcatgtccatcggcgaagcgaaagcccgtcgtgcgaagaaagagatggttgaagcgaacctgcgtctggttatctctatcgccaagaaatacaccaaccgcggtctgcagttcctcgacctgattcaggaaggcaacatcggtctgatgaaagcggtcgataagttcgaataccgtcgcggctacaagttctcgacctacgccacctggtggatccgtcaggccatcacccgctctatcgcggatcaggcgcgcaccatccgtattccggtgcatatgattgagactatcaacaagctcaaccgtatctcccgtcagatgctgcaggagatgggccgtgaaccgaccccggaagagctggctgagcgtatgctgatgccggaagacaaaatccgtaaagtgctgaagatcgccaaagagcctatctccatggaaacgccgatcggcgacgatgaagattcgcatctgggggatttcatcgaggataccaccctcgagctgccgctggattctgcgaccaccgagagcctgcgcgcggcaacgcatgacgtgctggccggcctcaccgctcgtgaagcgaaagtgctgcgtatgcgtttcggtatcgacatgaacaccgaccacacgctggaagaagtgggtaaacagttcgacgttacccgcgaacgtatccgtcagatcgaagcgaaggcgctgcgtaaactgcgccacccgagccgttctgaagtgctgcgtagcttcctcgacgattaatcgtcgcggggcatcgtctacagcctgttaaaaagctccctgcggggagctttttttatggcgttcaggtggccatcccgggaaagtcgcctctctccgctactggccgcgggttgccagggcatcgtccagttcacgataggccgccaccagcttatcgagcgtcgcccggtttaagccgctgggattaggcagcacccacacctgggtcgtcccgatggtcatagcctgtttcccccacttcgcgccgcgctggttaaaggccagctcgaaggcctgcttgccgagcaccgccagggcctgcggctgatactcctcaattttccgcaccagctcacggccgccgctgcgcagctcctgcaaggcgacctcgctggcctgcaccgtcggacgctctaccagcatggtgatgccgcagcgcgtatccagcagctgcagctcctcttccggcctgagctgccgatcggtgaacccggcctgatggatgaccttccagaagcgattgccaggatgggcaaaatgaaagccggtatgggcggaggacttccccgggttgataccgcaaaagacaacgcgcaggcccggcgcaaggatatcgctaatcatgttttctccggctgtatggctaaaacatgattataaaggattgaaaatgcattgtttataaaaacagcagctgcgcgctttacgctggattgcaatcgccagttactttataatccctcgccacggccccttagctcagtggttagagcaggcgactcataatcgcttggtcgttggttcaaacccaacaggggccaccaaattttagctttaaaatcatataattaagccactcgaaagagtggcttttttgttacctcgtttttgagtggcgataaaatggcggtgaattttttatcaccagtttcctgagcgcataaaaaaacccgcgcgcggcgggcatttatcggaaatttatcagagccacaatggccgctgaccaccaacagtcgggtgaggtggggctggtactatcgtacctggtgtaacaataaaacgctccaccgattccatcgttacaaacgtacagctgcaatttatgttagtgcattgatgataacgctctttggtattctcacttagatagcgactggtgcgcgcatgtgccgcgtgctggcattttggacaatggaacatttcacactccattaattcacataaagtgaattaatgatactcattttttcacaatttgagaatagctttattcttcctccccttcagtcccgtactcgacatccaacaatctaacctcaagctctaaactcgtcgtaaagccactattactcagagagtgcataaccttcgtgattgtccatgactgctcgtctatgacgcgcttaaagcctgaaacctgcacaggtgtctctgggtagaggtcggcgcgtcctgtcgcaagcctgatagaaaactcagcaacaccacgttgcagtttgtcccatttggcctgggcggctcgcatggcctgcgctttggttgaaaaaattgtcgttagggcaaacacgttgtcatcctcgccgaccatgtattcaccctccctggcttccggcgtcttcaccgttttcttcttcgttaccggtttggctttggggtgctgtagcgcacgtaaatgctgctctttgggtttgcgttttaacgaaaccttttgcttttgtggttttgggtctttggtgtgcaaccattttgccgtaacgccggtatatgccccacggtcagcaatggaaaactgatggcggtcgccatcactgcgggtgatcgtgacctgcggaatggcctttccgctggctgtaacccctcgaccggctttgagaaaaagtaactttcccgcttttaccgaaacctcaccgccgtttcgctcggcgagccgtgtcaaaaatttggcatccgattcctgtgactggtcgatgtgcggaatttttattccggccagctccggtataacgctcgacgtcagtttgttacgtgtcgctatcgctgccacgatctcgccgagcgtcttgtcatgccaggactcttcccgacgtgagttcagcgtcccccgaaaatcggcgctacgggcgcggattgtcaccgtgtccggcgcgccatgatgttcaacctcatcgacggtaaaacttcccttaccaatcaacgcaaagcctttccacccgaggtaaagcgtcagtacggcaccgcgtaacggcagctcgaccagcccgtcagcatcatcaagctcgatgtcgagctggtcggcctcgaatccgcgattgtctgtcatggtcagactcatcaaccgattactgatgttgccggtaatatctttgctgtcgagcatcagcataaaatcgggcgtcagttcgccacccgcattcagattcagcatatccagcatcagctaatccccaccatgccggacactgatgaggccatatttcctgccttgccaatcagtgattttgcctgttcgccgatatcgccatacagcgccgcaagggattcatccacgcgggtgagcgtcagcgtaaaatcaattttgcgcgccgttccgtcagcaaaaaacaggcttcctgtctcgctgatattattgatgacgtacataccgtaaatcgtgccggtaccatccagtaacggccaggcgcgcccctcgtcagccattaaacgaatggccgtcatcgtcaactttccgccggtgagctcagggtacaacacaccggccagggtaattttttcatcccccggccccagatactggaaagaatcccgcttacctacgcgggagtttgacggccaccgatattcggcatcgcgttgcatcgtctggtgtggcaacgtctggcgcataaaaacaaacatgccgagtgcaagcatcatttttcgttacctcctgtcagtcgtggttcatgctggcacgctgtcgggcgcgtttttcacgctcaaatttttcgagcgcatcctgtagctggcgatcgagctgcgtaccgctgccgcccccctgaacgtcaatgtgatattcgtttttactttggtctatataagaacgtcccgccggtgcgatgacgggttgatatgcctgatagccaccgtaagtgccggttgccggaatataagagttaccctgcgtggctgcgttcgcttttgcggcagtctggtcaagcgtgctggactctttattaataatgccgagtttctcaagcacccaatcaataccgctgcgcagcttattaaatgccgtcagcggcagcgttaaggcatccgccagccgttgaccgaacaacacaccggcatcacgaaaactgtttaaggtttcctgcgatgacttgaccggcgcaatcaggttgttaaaccagtcccacacggctttcagttttccgcccagccagtcaaacatcggtttaagcggcgcaaacagttcagctactggcgcaaatgcggcccgcatcccttcaatcactccgccgaaaaatgcgctgatgggctcccaatatttacggatgagcaatgccccggcgacaatcgcggccacaacagcgacaaccggccaggaaatcgcgccaatagcggtaatgatgcctccggccaccgttgtaaatacggtaccgagcgccgtcgcagcggcgatgatggcattaactcccgttataaccggccaggcaatcagcccaatggccccaatcatacccaccacgccaagcgccacggcggtaatcaccccaagcgtctgcgcaagctctttatttcgctggatccacttatcaagtttgagcacgtagccagtcgcagtctgcaccagtttgcgtaatgaggattcctgctggtcaaacaggtcggtgccaacagcctcatacgcagactgaaactctttgaagtcgccgccgaggttatcctgcataactttaaccagctcctcggtcttgccgtccgaggctttaaatgccgctgtcagcttatcgagtttcccgctggccgcagcgtctaacagggcattagacgatttcagcgcttcctcgccgaatatcgttttcaggtattcgcctgtctgacttgttccgagcttattctttttaaaactggcctggatttctttcagaatggtaaatacgggccgcatgttgcccttgctatctgccgtcttaacccccagctcttttaatgccgcccatgccttacctgttggggcctgtaaccggctgacgacagcgctgctcccggtaccggccatcgatcccgtgatattgttatcatgaagcacacccgtcatggcggcggcttcttcgaggcttactcccgcagctttggcaactggggccagataggttaaggcgtcgcttaatccctgaaaatcggccgctgatttattcatcgttgctgaaagcacatcgccgatatgggctacccggtcatttgaaagctggaaagcgtttttggtaccgagcaaaagctgcgcgttctcttccatcgtccgccggttagcgagcgccatattcagcgtgacgggggtcgcagcctggattgctgccgcatcgccgcccgctttcgcgatgataatctgagctccggcagcatcatcggcagaggcggcagtattgtcgcccagcagtcgggcctgctttcgcaaagccgtcatttctgcggagtctttcgccacaccgagtacagcctgtaactcggagtttttctgcgcaaaatcataacccggtttcatcagtgcaacaccggccagcgttccggtcgttgccataccaacaccggcggcacccattgcggccgcgtttccggccagctccttaccggcctgatatcgctgtttaaccgcgttgagctttgcctgttgcgcgctgacgcgcgccagcgcttcacgctgtcgattgagctgcgtcgtcgtttcgctgatgttggtttttaaccgacgctcgtctgccgccagggtgcgggtattgattcccgcctggctgagttcctgccgctggcgctgtacggcctgccgcaagctgttgtgtttgagctggagcgcggcggcactttttcgggcggcatccattgcctgcgcctgcgcgcgcgtcggctgttcagtatttctaaattggatcgccagtgccgcggcttcctgtttagcttgcttcagctcctgaccggtaatggcaagttgcgcgctggccttgcgaaacccgtcgatacgggatgcctggtcgttcagttcacgcagtgatttttgagtgtcccggatatcaccagacagcgttttactcgctgtctggatggatttaaacgggcgggtcgcctggtcaacagccttgagtaaaacctgcaatttaacgtcgttactcattcgtgtttccgcttcgctgtagcgccttttcgcgccaggtggtgagctcggtcaggctcatgggatataactctgatggcggccagtgaaaaatcaccgcgatatccgccatcaggtcatcgaccgacatgtctttcgggaaatttaatccgccaaattcggcgacaaaaaaccgatcacctttgttgccagcgccatcaggtcgggcaaatccatcatgacgacatccgattcggtaagagacggactggtcatacgcggcagcactttaatcagggcatccacttcagagcgcgcaacgtctgccaggctaacgccgcgcagggttccggcgttaggcttcatcagggtgattttttcgatgacctgctcgccgcgtttgatcgggttttccagggtgacgatgttttctttgctcatgagtttctcactatttacggattccgggttaaccggccagacatgctggctggggaaaaattacaggccgatattgcggcggtgctggtcgagtcggtcgacgccgttcaccttctcaatcatgttgaggacgtcgatttctaccagctctttaccgttcatggtcagcttgtagtacgtgcagaccagcgataatttgctgctggtatcctcgccctgtttgctctcgccgttatcgacttccttcaccttgaaacgggtctcaacttccaccgccacggtttctccggtatcgtcccgctggtaagagcctgcatagcgcagtagcgtcccggtaccgacggcaccataaagcgaccagatcgcatcatcagggaagccgccgagggaaatctccatcgccagcgcgtcatcgtcgaggccgaaatcgacaggggctgagcctgacatcccgccgccccggtaattttccagcttacgggtcagcttaggcagggtgacggactcgataacgccgagatagctgacgccatccagaaacgtgttcagatatttgagcttgcgcggcattgccattggtcagggctccttaattgctgttaaccgatgacaccagattcgccaggtatttatcggtaatgcgctggcgtagcgtcaggttttcgagagggggaaccggcgtatagtcgtaatcgatatacagttttccggctttgagggtcgccgcgtcgttggccgattcatcaaaccagcaggtcgcatcgacgatatagcccgccgttttcatctcgcggaatttcgcattgatacccgcaacgatgtccttaatcagcgtggcagtgatcggcttgtcgaccgcccacatgtgaccagcggccattgtgtcagcgataacctgcgcggtgcgggtgtagttctcgaacaagaacagcgggtcatcggagcagcagcggttgccccagaagcggaaaccgtctttacgaatgagcgtggtgacgcctgcctcgttaagcaggtcggcatcggtgccggattcctgcaaatcccagaagaccgacgcgctgatgccggtgacgccattcacaccaacgtttgacagggttttatgccagccagtgtcctggtcgattttggcgcgcaggcccagcgctcgggcggtcgcccagacggtttcggtcgcgttcgccgtggtgtcccatgccagaaaatccggccagataaccatcagctcacgctggctgaaattctcgcgatagagcatcgcctcggaaatgttctggcaatcccaggcgctgatatagccaaaggcacgcagcttctggcaaatcggcgcgagggcggtcgccacttcgagggaatcgagacccggcacaccgaggatgcgcggtttaacgccggtgacggcctccgccgtgagcagcgctttcagcccggtgtaattgccgctttcgtcggtgccgccgatgatattagagatagtctgcgcttcggcatcgtcgccagtaccttcggcaacgcgcacaacaacaatgaccggtttcgactggtcggcgattgcctggagggatgcggccagagtgccttttgtacccgctttggcgatggcgctttgcacgctggtaatcagtgcgggcttattaagtgggaaggtggcggcatcggcatcgctggccgtacagaccatgccgataatcgccgttgatacggtggaaatgacgcgggtgccgtcgttaatctcgacaacctggacgccgtgatgaaaatcgctcatccgtttaactccgtggttaagggtgagcattattttcaatcgtgggggaaggggtgacgagtcatccccgctgtaacagggacagtacaacaggaatgaccgtcacaggtcaggctacgcggctccagcacatcagcagggtgtgcgcttccaccacgctgaacgatttaccctcgccgaggttgtcggttttaccggtgacgtcatggtgatgcggtgggatatcaatatcatgctcatggtccggttcctcgtcggtatcgcccaggtttgccgggttaaagcgctggctgatatcaccgccaatctcccacgggttctccctgctcggcactccgccatgtttgtgtttaccggcgggttttgtggtcagcgtttgctcgggctgttcgctggtctcgccgctcacgtcaatctgcacagcgggcaggttatcgcgccggagcgtgacgttatcactgccgccgatagtgccgacgtccgagccgtcagctttaccgatgcggatcgttttgttttcgccggtataaacccattctgtccacggatagcgctcgttagggttgacgttctgcgcgtaaaacttcaccgtgccaacagggttgtccagctcccacgcagaacggatggctgattcaaccgccagcctgacagccagtggcgtagcggctctgtcctggtcttcgccgtcaatggcgttgctgagtcgggtaaaccctttttcgtccagcgtggcgtccgggtgatctcttgaccctgcgtgctcgcccaattgttcgtcgacatagtctttaatctcgttaccggcgttaatcacgtcctccacggttgccagcacaattcccgggtcaacaaccagctcaacggcttcggtgctgctgaccgccagccagattctcagaatggtaaagcgccccgaaccttcggtaagtgctggtttataggtctccggcacattggcaaccgccatgcaaataccggcatcgtcaaacagcgctgcctccctgatggtaaacccacccacctctggcggaataatcatctccgcgataatgatattttcggtatcggacaacttcaggctgttaagctgggttctgaaacactcgttaatcaatgaattcttattttcatcgggaattattgcagtgcctctgccatcacccaccgacatttgagaaaaaacaaccttattcccgctaacgattgcggcagctattttttttcgaccggcaaccgttactaccgatttaaaaatcttgctcatcttgatttactccgcatatttgacgaacatcggcaattactgacttttatcgtctggtatttttttgtgtttattattttgcttctaaggcagataatcttttttcaaataacttttgtttttcgacggtcgcccggagcatccacagaagcagctcttctttcctgaaagaataaacgccgccagccggaatgatatttccttcgctgtcggtttcttcctgccatgagtcgtagcagaatgccgaataatccgtccagttcaggccgtgtttacccatcacttcaatggctgcctgcacagttggacccgaatgcaacctggcttcatcgccctctatctggtatttctccagccactgccatgcccacggaagggatgctatctcataaaatgccgccatttcggcttcagacgggttaacaggtaccgtcttgtgattggcgtcagacgtatttattgtgctgtttgccgcataaagttgcttccagcgcagcgatgtcgcacccagcgccgactggttatcaatggtaggcgaaataccccccgcaccgatggacgctccgcccgtagaggaggttggcgcaccggcagcatacacatcaatacggaacgatgtcgggtaataactgaccttcaccccaccgatgccggagttatctgcgtacccgttagggttggccgcatttttaccgtgattgtaagacaccacgaaaggcgaagatgacaactgtgacatgtcgtcggtgtagaaacgcaggtacgcgcccgaatacggatgctcccatgcagccatcgccccggcttcagaatcaacacgcccgccacgaacataacgggcaacagggcgcaacgacaaggtgccgcgtttttgtccgcgaacctctgacacctggtcggtgatggtcgctttcagggttcgggttacatcaatctgggtatcaaagttgaccttgccggagttataaaccaggttgttaacgttcttaccgtaattacccacatacagttcgccagcctgctccccaacctgatggtttatcatcactgtctgatgcgcatcgctgacggcattacccgcctggcagttctgcattattgagccaatgccaataatggtcaggtcaacgccacctgtcaccaacccattcccgacgctcacgcacttatcaaccagctgctgccgaccttcttttgcaatgagtccgtgagagccattacgttctgtatggcaactgataaaccggttatagccgccctggcccactatgccggttctgcgattgccaaccccccggcagttggtcgcggtgagatgctggtcgaggtacgttgttgagcctgaaccatacgcattctgcacatcaaagccgtcataccactgacctgcgcccagacagtcggtgacgttgatattagttgaacagatatcggtatcagtccagtcacgcacaatgtactgcccgaatttaacacccgattctgcgttatcaataaaattacagccgctgacgtaaattccgtccgtacccgtaatgttgaggcccatcgcacggccttcgaacagcgtgcagttggtaatggtatggtttttcccacgcgcccacttgaaatcattcagattcgttgcactggtttcatgaacatacccaaacatgactttatcgcgggtatggttgatgatgctgatagcccccatattgcacccgccgcgaattacgcagtcatcaaacagagtattaataaaccctgcggcaatgaccgaggcataactccccctgacgccggtaaccgtcaatccatcctgtgcggttgcatccgatgagcggaatacaatcgcacagcagacgtcctgataaaggtatcctgaatcaacgtcagtggcgtcctgaaatggcatccgaccataacccagccgcccctgctcttttatcgtccagtcgtcattataaataaccgcccacggtattgttttgctgagtaagttaccgcctcgccacaccgacccgccgccgtcaataatatcaacggctacgccatcacaaactattttagccgtcccggcgtcaacattgattttcccggtgtactgaatgacaccaggctgaatgttgtaggttttcgtcgagtccaggacaacctgtgccgcgttctggttcagcgcccactggatagcagcagtatcatcgtcatcattacccgcaccagtcacaaaaccagacatttccggcgtgacgtagttcaggccgcctacgagtttagcgccgctatcagccgccagattttgtctaatggctgcatctgatgtatacgcccagccccccgccctcacacctccggtcgttgccggagatgacgctatcggcacggttttagggaactccccggtccagacaagtcgatagtttccgtacagaatttcttccctgggggattccagcgtcgccccctccgtaaaggtttttaccgcactaaccttttcagcgacaagctttcctgactcttcagcctgctccttgagataacgcgtacggttagccaggcttttcagtggccggtttgcaacgccgtccagacctccagaaacgcgctcgcttctggaaataagctcaatatcttcttcccacgatgaggattctggaattctggtcataaacttacccgtagttaaaattaccgtcgtgaaaaatcacgccgttatatgtgatattttctcctgcctcaaaatcggccggataaatactgataatgtcgctgctgcacagcgttgagccgacatgaatatcacctcgtacttttgcggatatattgagctgtgccatatgtcgactcacaggctttgcatcgttaatcaaccgggtcagctcatcgagcatcctggatgtgataccaatatcattcacatccacttccagacggaaagtcccggcagggtctgccacctcccaccactctgcgatggagaatgaataacccattttttcgactacatagcggattgctgctattgtcccttttcgctgatggagccagaacgactcactgacaaccgttcttttctcttgttcgctccagctttcatcccagctatctacggagaaggcccacgccagatagggcagaaatttcacggggcatttccacgggttccacaggtcacgcagcggcacgtttaaatcgctgatggaggcgcatgcggcggcggctcgctgttccagcaccgacgacccggtcgccatcagcgagttactcatcggagcctccgatcacgacactggtttcggtgcagtacgcggcctgggttttatcgagtacgacgtcggccagcggttcgcgcagttcgacacgctggacaccctgcacatgcagcgcggcatagatggcagatagtcgaatatcccgaccaaggcggcgctgttccgtaatataggcagttaactgcgcttttgcggcggcaagaatcggctcggtcgctggtccggggtaaacatacagcactgcgtcgatcgcataattgacgatttcagccgagacgactgtcaggcggtcagcgaccggtcgtacactctcatcatttagcgcggtactgacggccagcaataaatcatccgacgccgtgccgtcaccttcccgcgatagtaccgcgatagtgacctcagctggagccgggctattagccgaagcatccgcgacacgtccgtcggcactcagggcgtgaaattcataggcaccggttggcccagcaacactcataccctcaaatgccgccggtacgcgctgacgtaaatcactgtcagattccatgaccgccgccaccggcgggatttgggtctcgtctccgggggtgatgaccaggcgttcaacgttattatttgccgcgagctggtcgaggtcgtttttgatggcataggccaccatcccggctttcgccgcctcgttaatgcgctggcgtaaaatcacctcacgataggcattctcttcgagatatttcaccagtggctcagactccagcgttaatgtcctggcgaccgcttcctgctcatcttccgggtacagtgaaatcagcgtcgctttgcgctcggcgaggatggtttcaaaatccagtgtttccaccacatcaggcgcggggagctggctcaggtcgataactgccataggttcaactcacagggatggttaaggaaaggctctcaccggtatcggtgatttggccggtcacgtcgacgaccatctgcccgttaaactgccgcgctgtggtgatgctggtcagcctgacgcgcggctcccacttcaggatcgccatgtagcacgcggccataatttgcagctcaagtgccggtgtctgaggctggtcaatcatctgcgacaacagcgagccgtattcacgacgcatgacgcgggagccgacgggcgtgcgcagaatatccccgatgctctgactgatatggtcaacgtctgaaatgctttcaccggtcgtgcgattcatgccgagataacgcgccgtcattgggtgccctccgtccattcatcgccgcgcctgatgccgccgtggccgtgtttatccacctgcacaccgttggaagtgaaagcgccgccgctgtgctcgatatcacctgacatcttgccgccttgctttacctccagcgtgccggtcgtcagcttgttggtgcagaccacctccggtgtatcgagggtgacgcgggtctcggcttttaccagcaccaccggcacgctgacggcaaccgaatcggatgcggtcacatcggcggttttaatgccggtgacggtcagcgcgccggtttccggctcataactcataacggcaccgtcgggaaattcaacgtgccaggcatcagcagaggccgacggcgcggggttgtcgtcggaataaatacccggcagcacaaaagcggtatcgagctcaccgcccacggccagaatcatcacctgctcaccaatggagggagcccaccaggtgcgcgagcgcccggcccgatgcgtcagccactggagccagtcggtataaatgccgccggtctgcacgcgacagcgcccggcgtcgaggtcagtttcgacgacgattccggtgcggatcatgttgcgtatcgcgcgggcgagttcctggatagatgcgagagtattcatatgggaaaggatgccgccggggtgttccggcggcaatctgcgggcgttttgccctggctggcacaacgttatctgtatcagcccggatttgacctgacacatcgatgacatcgaaccagacctaatctgacgggccgctctgtgccatagcagacacatttatttaacagtacaaaaaaacaacctgcgcaataaattatcaatgacgataaaatcattcacaatgcaaccaaccactagtaatttataatttagttatttataaattaaatttcttaaaaatcacactcctcctgttgattggaagaacaaaattaactccaaagtttttatcaggaccataacaagctatcaattcagaaaaaatatcatgatacaattcattctttaatgaattatcgtaaagatactccatgacatagcgtgagatataacctgccagaacatctgcaagctgaattcccgcagatttttttgagtctgggaattttaaattcaggtccgtttttatattaaaatccgttgttgaatcgaatggattttttacgtttgagttttttaattgctccgagcagaaaatcaaaatatcatcaaaatgatcttgtttgtcatgaaaaaatgtcacatctgatatatcaccattatggtacttatttactttacccataatattgaaccatgaatgcacatgaggcaataaatgtatttcattacatttcttgttaatgtcaggtataggaacaagattttttatcaaatcagtatttgatgatttattagaatgataaaatctgatagtagattgcaggcagcgtacagcatcagatttgtacttaaaagtaaattctttacttctgaaataagttctcaactttttcattgacgctagcaaagcggcttcggacttatctatacatgcctcaaaaaaagacatatagcaatctagtggtagattctctgacaagtaatcagatagttcgttacgaaatccttgcgcattgatttctgaatcaaactgttgaaaatatggcgggcaaatctgatgattgacaattgagacagcaatacaatattttttatcgacaacctcaacataaaatggcaatttgttttttgcaatataatcaaataaatcatagatgaatcctggttttgatttatatagattcttagattttaactcttctccttggaccctgtgtttgctttttaatgaatcaatatatttttgaagatcatcgcaatcaggaaccccgatacaagataatgcaaaaaatggttggttagcaaaattcaaatccggtggatttttaaccaaatccccagtattcccactctcatctaaaaaatactgatttaacatttctcctccgtttttattaacgctcttcagtgtaaggcatctttatacctaaaaccattcgccccaaagtaactaatttatatatctaatctaaatagcaggtcctaataccgctacatcctacaggaaacttgtggctcaaggatagtcagcctcatgccttgaacacttttataccaaggctcaagagtagtagtgatgatcagcaaaataatcactattagttactaagtgttctgctatccggaatagccattcagcattgtcgttaaacatatcagaaacttccactcctcgctcaaagcaggctgtcagatttgattatgtacgccactaaaaactgtatcagctcaatcggcgaggtagtcgataatgacgctttccacaagctgacggtcatcgtctataaagcccaggagctggcgctgtggatactcgacggcggcgcttttgggggatggtttatccttgagcccgagctgatgcacgcgagcgatgcgctgtactttcccggtaaattccaccaacgccgcgctgtcgttaccgctcgctttcatataacggttggttcgcagtttcgcgaacatctcgcgcttaatccggcctttctttgccctgacgggctggcgcttacgcggggcaaatggcgaaccgtccggcgctttctgcgacttaatgcgctgctgttgccgctggcgcagtttcttcgcaatgtcggcggtcatctggcgacgcccggcgggagaaagggccgctatcaacccggcgagcttgtcctcaaagggtttgaagtcattcatcccatttactcaccagttcgccattactccacatctcaacagggcgcgtcaccggctccggcggtggcggctccgggatgttctcaacgtacatcgcgccgtcggcctctttgacctgggtgcgctcggtcagcaacaggctgatgctgacatcaaggctgctgtcgttattaatgtcagcgtaccaggcaaatcctttttttctcccctcgtcggttgtcatgatgtccggctgattgactcgcagccaggccataatcggcacaaacagcaggtcaatatcgtcggtaaaatccgtgaccacgatgttaagcgtgtaccgcttttcaaacgacagggagctcgccagcgtcgccatattgttgccatcgtccaggcgaaggcaaagcatatcggggttagtacgcagtaccggcaccgcatcagttaaggcttttcgcagactgttgggcttttgcatcgatttcatcctggcattgtttaaccgtatcgacctggattgcgcaacttttcagggcgttttcgagctggcgtatatccgcactcaggtcgccattagttagcgggtcgctgcccggcatcgggcaggggctgaccttcgggcaggcgttgtaaacaatcaccggcggcggcgttggtgcaggcggtgcgctggtgcaaccggcgcacagcatcaggtaaatcagagcgataccagcggcgaaacgcgtcattttcattgagtaacctcgtgatagtttgttcacgcctgaaggccagcaggttagcggcggtgagcttatcccgcatgacaacctgcgccagctctttacgctgcgactgctctgcggcaacgttgagctgatttttcagcatggtgattgtcattttgtgttcaccagcgacccggttcgcacgctcaaatgaggcgcgcaaattgctgttatcgtgtcgcatccacagcagacccgcacaggccagcgccagcaggagaatcactatcttcatgcagttccccctccggccttgcgccacacggcgaccagcttgtcgaggctgtgctcacgctgaccgtatccggcacccggcaatgaagcccagatattgcgacagcgggaaatcgcacgctcgatgcgcccctgctgcaaatcttccagcgcaccacgctcccgaataagctgaatggcgagcctgtcctgtgataccgggctgaaatccggcaaagcgagctgtttctgataatgcggccagaacaggtaaagctgctggtaacgcccggatgccgtagatttttccccgcgacgattgaagaccttcgccgggcgtccaccggcgaacgggtgatcgcgataatcggtaaaaatctccggcttgccatcgatacccgtgacgataacgtcgtaaccgttgtttcgggtcagcgggtgcatcgccgtcccttcagaaaatgccagcatgtcgaggaatgccgcgacgttggggtgtgtcttaatgaccgccatcgctttccccttttttaatcctgcgctgaattgcaatctccaccgcctgataaccggcgatacccagcatggagccaaatccgcacacggccgcgggcggcaggtcgggaaactgcaccagggcaaccccggccaccatcgaaacaaagccgcccagcagcatgcgaccaataaaaagccgggcggtgatgggctcaccaccggccagcaccttaccgacgacaatcagcacgccgataacaaagagggacaggacgcttttttcaccttccgtcatgtgtttactcccacagattaattgtttcagttacgggggatgactggacatcgggcaattcgaccaccgtgccatgtggcagcactgcgccgagttcggccagccccggatttgcggcgagcaccgactcgaagacccgctcagtgcgcccgtaataccgggcgcaaatcatgtcgagcgtgtcgccctgttgcgcgatggcctgcatcagatttggctcacgatgcagcggggtttgtcctggacgcgtgatacggcccagcgcatgtcccgccacagctcgtcgacagtggtatcgatgctgtcggctttcttgtcgcctctggcgctggcatccacaccgcgataacgctcgtagagcgtggcggttgccattgaggtgacggcgcgcaggtaatagaaaactcgcacactctcaccgtcgagatcgtcagccggtacgtcggccagcttgctaaaacccccggcaatctgctgttcccgccacaaaaacagctcggcattggtttcggcgatgccggttttgatggcctcacgcagccgggccggggcgacggtctgctcaagtcgcatcccttcacgcacgcgtttcgggtcgatgtcaggaaagaaaaacgtattttttatcaccggctcatcgctggcaggcggcgggatgatcaccacgccacccggctgcggctcatcgttctttttaataatcagcgtcgtcatgactacctctgaataggtgggcggtggacgccggtctcaggtcaggtaaaacaccctcatcgaccggcgtgccgccctggcgcggggcgcattctgttaaccgacggtctttttcgggcggccacgtttagccggtgccgtggttttcacggcgcgcggcgcgcttaccggggctttaacgactgctgccggtttgggcttcagctctcgctcaagccgttcaatgtcttttttgacgcctgcctgacagtcgagctgcatcgctcgcttgaggtgggccagcgcgtcggcgggctgtttgttgtcccgcagcaccaagccggtgattttgtgcagttttgcgcgcacctcatcaggcatatcggcggcggcggtcagcgccagcgtgtcgagcagctggctgacgacgaccggttcaccggcggcatgggcgcgcatggcggcgagcgccacctcttcggtaaacatgtactgcggcgggcggcggtgtttgcctggcatggtcagaccgtacttaaacgcgtagcgggcaatatccatcgcgccgccgatatcgccgacatcgagacgccatagcatgacggtcatcacgatgtcatcctgtgcacctttgccctgttccagcacgccactgacccacggcagatagaacggcagcagctcgcgctttttcgtggctttcagctctttaccaaagatggcttttaacgtgcgttggtctgcggccagcttaaccagcatctgctcgtaggcagtggcatgccgcagcgggttgttttcccgctgcgcggtttcaatggccgagacccgcatcatgtgacgctgtgcggggctcgtcatcggttagccctccggttgtgcggcagagaaatcgcccagcttgatattttcaatgaagcacccggcggagtaggtttcgaccacgtaatcgatgttcatcgattcgtagttttccacctggtcgagtttcgggttttcgataatggagcggcgatgactttcatccatgaaatagatggacaggttatcgagacgcgtcaccataatcgcgttcgctgggaagtacggcacacggacggcgggcaggttgccgatgcgtttctggctgatgatgatgtcagccgcgagcgcttcgctgttgggctggtctttgttaacgatcgggaaatatttgtcggccagcagcttacggcccacaatcgctacaagttcggcatcttcctgataaatctcgtcaatcaggttgtcggttgcatccatgaccagcgcatcgaggttaacgtaatcgccgtttttacccacacggatcacagcggaaacaacattcccttcttcgtcgacaattttgctcatcacgcgggtcggcgcttcattacggtatttctgcagccagccgacggcgacgtcctgcaacatcggatgagtggcgcggtcagaggtttcggcgcgctcaacgccgttgaacccggccatgatgaaatcgagcgcctgccgctggatgatggcatcgcgaatacggcgctggaagtcctggaagcgcgcccacaaatccagctttttatatttgaagtggaagtcaaagttgacctgatcgcactcgtattttttggactccagcgcggtaaagtcggcggttttacgctccttgccgctgttggtgtccgtggtgctggcgatggtgccattgacgccgacgccaattttttcacccttcagctcatccaccggcacgatattaattttctgcaaaaaggccgatgacatctgcacggtgttcatcatggtttgcgtgacggacggctcgacggagaattttttactcacgtcgtccgggtcgatgccgttcagctcggcaacgcgggacaggtaggcattgaatttaaaacgggtttcctgacgcatagtctttcctgttgggttaaatcgggttgtctgaccgggcaagcctgtcgcccggcgataaattcacgaccgtttagcagtcggtcagcagctcatcgccaccgccaccggtggagagcttgcggcgtggctgcgtggtgctttcggtgttatccagcgacgtttttaacttgctgaatgcctggctggtctggtcagccttcgtggtgacgtcctgtttcagcgtcgcaaaggcattttccagcgtggcaagacgctgttcagtggcagtgaggttttcctgcacatgttcactgacggtcgtcacggcttcatgcacatcctgaaaacgggcgtcatcgctggcctgtttgcggctgaagatcgctttcactttgtcgctcagggcggtaaagacattttccgcctggtcttcaaactccagctcggcgagagtggcgacagaaatcaggttgcccggctcggctttgaagcggttgagggggttaaatttggcaccccggcaaaattcgaggtattcggtgccgaggctggccgggtcatcggtcaccgcgaggccgaccaggtagcatttaccgctattggcgaaattcggctgaatttccattgaggtgtagaccttctgcaattttttattcattgcgatcaggtcatcggtcggggtgattttggcgaacagcgccagcttgcctttcagtaccgaatcgtcatcaatcttttcagacttcagctcaaccacatcgccgtaacggctgaacgggccatccggcaggatgcccttcaggtgttcgaggttaatgcggcaaccatagacgcgggggtcaaaggtctctgccatttcctgaatatccgtcgcgctgataacgcggccgtcacaggtatcgccttcgacgccgatgcgaaaccattttgaaactttttttgccattgtcaggagtcctgatatcgggttaacgggtcggggttagtttcccgacgtcgccgcccacccgctatcaatcccggatggcttatccctcacacaacagcaccttagcgattcgcatcacccgtttctttagccttgccctgtatcaatcacggcgaggcatccatgaccatcaccaccgacaccactttgttaaacgacccgcgacgccaggcggctttattgtactggcaggggttttccgtgccgcagattgccgaaatgttgcagaccaaacgcccgacagtgcagagctggaaacagcgcgaccagtgggaggaaaccgcaccgctgaaccgggtcgaaagcaccttagaggcccggctgatccagctttacgcaaagcccaacctgacaccccacgatttcaaggtggcggattttctggcccgacagatggagcgctttgcgcgcattaatcgctatggccagaccggaaatgaggttgaccttaatcccaatgtggccaaccgcaacaaaggcgaccgcaaaaagccgacaaagaactttttcagcgacgaggctatcgagaaactggaagagatttttttcgcggagtctttcgagtatcagctccgctggcaccgcgccgggcttgagcaccgtattcgcgacattctgaaatcgcgccagattggggcgacgttctacttttcccgcgaggcgctgctgcatgcgctgaaaaccggccataaccagattttcctgtcagcgagtaagacgcaggcgtatgtattccgcgagtacatcattcagtttgcccgccgggtcgatgtcgacctgaccggcgacccgattgtcatcggcaacaacggcgcaaagctgatttttctcggcaccaactcaaacaccgcgcagagccacaacggcgacctgtatgtcgacgaaattttctggatccccaacttccagaaactacgcaaagtgtcgtcgggcatggcctcacaaagccacctgcgcagcacctacttttcgacaccttccaccctggcacacggcgcttacccgttctggtcgggggaattattcaaccggggccgcgccagcgccagcgagcgggttgatatcgatatcagtcatgacgcgctcgccgctggcgtggcgtgtcctgacggtcagtggcggcagattgtcaccattgaggatgcgctcgccgggggctgtacgctgttcaatctggagcaactcaagcgcgaaaacagcgtcgacgacttccgcaatctgtttatgtgcgagttcgttgacgacaaggcgtcggtgttcccgttcgaggatttgcaacgctgcatggtcgacagtctggaagaatgggaagactttgcgccgttcgccgacaacccgttcggctcccgcccggtctgggtgggatacgacccttcgcacagcggcgacagcgccgggtgtgtggtgctcgcaccgccggttgtcgccgggggcaagtttcgcattctggagcgccatcagtggaaaggcatggacttcgcgactcaggccgaatccatccgccagctcaccgaaaaatacaacgtcgagtacatcggtatcgatgcgaccggcctcggtattggcgtcttccagctggttcgctcgttttatcccgccgcccgcgatatccgctacacgccggaaatgaaaaccgcaatggtgctgaaggcaaaagacgtgattcgccgcggctgtctcgaatacgacgtcagcgccaccgacatcaccacctcgtttatggctatccgcaagaccatgaccagcagcgggcgcagcgcgacctatgaggccagccgcaccgaggaggccagtcacgcggacgtcgcctgggcgaccatgcacgcgctgttaaacgaaccgcttaccgctggcagcggccaggtaacatcatccattctggagttcaactgatgagtaaatacaaaggccgcaagccacagccacaaaagcgcccgcgcaacatgaaagacagcgcgccccaaaaaatggaggcgtttacctttggtgaaccgagcgccgtgctcgaccgccgcgatattctggattacgtggaatgcgtcaataatggccgctggttcgaaccgccggtcagctttaacgggctggcgaaaagcctgcgcgccgccgttcaccacagctcgccgatttacgttaagcgcaacattctggcctcaacgtttattccgcacccgctactgtcacaacaggacttcagccgcttcgcgcttgattttctggtgtttggcaacgcgtttttagagctccgaaagagtgtcaccggtcgcccgctgaagctggaagcgtcaccggctaaatacacgcggcgtggtattgaagatgatgtctattggtgggtgccgtcattcgaccagccgcacccgttcgcgccgggatccgtattccatctgctggagcctgacatcaaccaggagctgtacggcatgccggaatatctcagcgcgctaaactccgcctggctgaatgaagcggcgacgctgttccgtcgcaagtattaccagaacggggctcatgcgggttacatcatgtatgtgacggacgccgcgcaaagcggtaccgatgttgaggcgctgcgcgatgcgatgcgcagctcgaaggggctcggcaacttcaaaaatctgtttttctacgcaccgcacggaaaaccggacggcattaaaattgtgccgctcagtgaggtggcaacgaaagacgatttcttcaatatcaaaaaagtcagcgccgccgacctgctcgacgctcaccgcatcccgtttcagctgatgggcggcaagccggaaaacgtcggttcgctcggtgatatcgagaaggtggcaaaggtttttgtccgtaacgagctcataccgctacaagaccggatgcgcgaggtcaacgcgtgggccggtcaggaggtgatccgattcaaaagttacaccctcgacaccgaaagtgactgatttccgccgcctccgggcggctttttattacccccacgcctgaccgcctcagaagcccgccaagccctcaaacacccccgcaccacccaccaacaccctcgcgaacctgcgcggcacagcgacgcgctcaggctgcgaaaataaatgcgcaaaagtacgctggcgcgcagtgctttccccgcctcgcctgcgcacttaacgggtcgcttttaatgcaattgcatcaggagccccgagccgcgcgagcgttggcgctggctggcaaatactggaataaaaaaacgaatgcaaactcatgcaccttttgcatgcagcttactttattgttgcctgataacgagaataggcgtcctcaaaagcttttaagtatgcctttggcaaatcaaattcatatgtgttgaggttggttgttataaatagcttaccttttttaaaatctatgtttttattcatatcaaataacgcatatgtcgaccaccaagcaacccctgagtcgattgtaaatttaacgcttttcatttcacctttatatgatagcgttatatcacgatggcctataactttatctaaagagcatcgggctgatgttcctcccagagagaaaaaaacaccagtaatattcaccgtcatatttctcatattctgaataatgagattacaattcacccccttaccatgagtaacatccacacttattccatgagtaaccctgattttttcattctcattctgagtagcttgatacgccatgtacaatgagactaacacggcaagtagagttgcaattgcagataaccacccacccagcatactccacaaagccacctcaccggcatgattcttatcagcccacccccaattaaagccaccgaggaaaaaacctaaaacgaacatcaaagcagaaaggataattatgccgaaaaattttaaattcatatgataaccccacgtccaaacagcttttaatttacgcatcctaacgcctcacaaggctcgttgttcaaccccgccagcactgaaatcgagtttcagcaccggcggcgttcgtcacaatattggttaattgtcgagtatcgactcgacttcacccgttcgcacgtttacgcgcgctgcaaccgtttgtttaaccactccaccataagcattagtaccacgaaatgttgtttttacaatggcatgtgggtctttattcaaaatcagatgataaacagttgaaacatgtttataagaggagtcatcgttcatactgtctttaatcattttttctaacggacgataggaaccgtcccatccgctgaaattactcttaaacgtatcaaggttaattttactgtttagcgattgtgggtctctttcaaagtcgttgaaacaccaccccaaaacatcaccaagctttaagctctcatctttagtaaaggtatattcgctcatacaagcatagaaagcacttttagcgtttgctggtacacctttgaagccaacatagtctttaacgatatcgtgccgtgtttcttttggctcgttacgatactctttaagtgttttatctgcatatttgaatgctggcgtagtcggttccgctttaatctctgacacgtcattttttaccacaggttgacttttttcagtcggccataatattgagccaataacggccagcgccaggcatccgccgaggtaaaccgcgctggagcgcttacggttcggcatccgaacaagcgatggcttgattaaacccacgataaaagcaataaagagagccagagataaaaatgctattacggtatccatgattttcctttgtatgtaatcctcatataaaacaaccccatgctatcaaacatagggttgaaagttgcacatttttcagggattaacgccagctttcatcttcccatacttcctgaaggatactatccagcgcttcgcggtctgagtctttatcgaaccccatcagctcaacacctgtcatggatccctttctaactgtaacgcgcgttgacggaaaaacagactgtattcgccttgtcaattcgcattgaaaagcatcaataaccggctggccaattttttggtctttatccaacgtaatgtttaccctcacttcaccacctctttttaatcgttctttagcgggcgtcgcggagaaaacaaccgaaaaggagttgtttttcattaagttccctctggctatctccgcaattaaattcaatgcgatttcgcggtctctttccttacaagtaccctctgccgtcagacgcgcaatcatttcgactcgctcaatcataacgtgctcgcttaactctctatccacataacctccgatacgagatactgtataaacatacagtatcacgtatcggtaaaaggtgtgaagaaaaaatgaagtgaaatacactgtatgtacatgatatggatgaatattaatgattacttttcattgccagttcagctatagccgcaacacgattaaggattttcatggctttggcctcatgtgagggcgctgcggaaaatatttctcctcttgctgtcccgcgcagccatttgccctcaaaacagcttttaccacccctcatcaggtgcagggcttcgccccggctgattgtgttgccggttgtcagatgtatctcgtctatggttttcgctattgctgcgttttgctcatcctttccgtggatgaattttcgccgtgttgctggctttttcttcctgagtcggttggtcagctctcgtttttcacgccgactcaatggttttgttaaatccagtgctggcggttcgctttcgctccccgtacagttattgacagaactccgagagggcgcaggagcgcccttaacgtcaacggccaaatcaacggcacgcttcggcacaattttccactgcgttagccgggttaaaatcggggtgtcagcgccgacggcggaatcgtacacgccgcgaatgcagatagtttcctcaccatactggttaaactcggcgcgaggctcatacagcgtgcgcacctgcaaatcgtcacgacggacaaacgggccaccctgcgcattaacgtaaccagcccagtcaccggcgtcagcggcatcatgaacggcggcaaactcaacgcttaaaccgtgcgcggtctcggtatcagcgagacgacgcaactcacggtagaccgtcaccggcgcaccaccaataaactgaaactgacggatgtgccagcgcgccgcccatgctgaaacggcgggggctgtctctttcagcagctcaccgctttcgtcatcggtttcaccatcgagagcataaccgtcgatatttttcgaaatgtatttagcaacatagccggtagcgctgcccttttctgggtcaatggcctcggcatgaaagcgcgcttttttggctttatcacttctcagttcgtggcggtcttcctcccatgcataatcacggatgataaggcgcacgcgctcgacgtcctccggcaacatgaacataagcatgtgccagtgcggcgttccgtcgtgatgaggttcggcaacacggatgccgaaaatgcgtatttcttcccgatgcagcttggcgcgtatgcgcgcccaaaggccagttagatagctctgcgtgtccgatgggctggcaccattccatttgctgttacggtatcccgctttagtcgtggcgtgatatttagacggtgtagtcagggtgtaaaactccccgacataaccgagttcattgcagatattttcaaacccacggatgcgggtcatcagttcgcagcggcgtatcgcaggattagcgaccgaaccgtcgtatttttcaatcaggctgatgcggttgccgtcttcgtcttcgagatccagtcccttgagaaactcacgcgttcggcgcttctgttcgcgccagtctgttacgcagtttttactcgcgtaggcgtgctttttcttgctgacgttgccgactgcaatttgtaggtgttcgcgccatgccgacgcgacacgacgcagacgattacgccaccatgactcagtgaacatacggattattgcaggggcgatatcatctttgttgaagtatttatttgctacgcgctcccaatggggaggggtgacattgaattgcagagaaataaaaccagcgtgcatgtaccaggtgtatagcgttttgagctcaccaaaacctgaatcatcaatatttcccagctcagaacgaatgaaattagcgatgtcacatgccagcaagtcaacatcggcgcgcgacatatcagggaggcggttatatctggcgacaagattaaccatgcgagatgccagatattgcatgagtcgggtgtcaaaatgtccaccgaaaacggcggttgatacattagtgttgatacccgcgctctcatatttttttgcgaccagctcaagacgcggcaatgcctttttgcagaaactgattaaaaaagcattggctcgttgactgctctgattttgctccagcaccgccgcagtgcgataaacgtcaaaacgtacgcactctggctggagagaaagtaccttttttgcatgcagcaaagccgcgaacatacggtcgcggcgatactgttggtcataggtaagatatgggctggctattgccgaccgtggagcattccacggataagcgaattgaaccgccaagtcataccccccgaaaatgtttagatttcaattcggtgacctcctgacaggtcacgcaaaaggccacacccggaatcgcaatgcggcgagcttccgggattggttcgtcacattcttcgcagagaaaacgggaaggtgaggcgatacggctacgcgcgttgctgatgtggcgttcgcggtcttcctgctcgcgcagttgtgctaaatccattgcgtcggccattagtgcagctcctgtgattcattctcaaagcgagtggcttcacggcgcagcagttcggcggcttcggtacagctcatcccctctttgatgatatgtatcgccagtgcctcaagacggattgaaacagcgagcgcgcggtctttacgctcttcttttttggcatcagtcagcaatatggccagcgcatcgctatctgtattaaaactacgggttacggtattatgcataatttattctcctgatttcgggcaataagaagcccggcgggtttacgccattaaatttctgtttggattaattcggcattgttagccgttttggaaataagctcaccactgcgcgaaaatgattcatcgctgtaataagcgcttttttctcgtcagtagtcagctcacttaattggagctcatgacgagccgcagggatttttgccagaaagaaaatagcggccagcgcccgattattttcttcaaattgtgggtcacgtttatcacgcatatcatcgacaaaacgttcaacctctttccagctatcgccccaatatcttgcgcgcaattcagccacatgattgagaccggccagacgttcacccgcttttagcggaacagtcgcggaaacagcttcgatagccatgattccccctgcttttgagtagagagaccagccagtaaatcagcctgtgagttgctcgggtgccagcgcttgccgtccttacctgcgatccagccgtggccgtagtgcatgccgggactttgctttttaagcagagacgcgaatgacggttcattattcaacataagcacctcacatcagaccgaatgaggcaccgaggccgctcatggtgtctacaacgcttgtcattgccgggttagcctgaagccgcgcatgcagcgccagagccgacaatgacaacatgcgaatgccagcatttacgctttcaatcatgttgtgcttacgtgcagaggtcaggcgctcattagagaccgcaccgcttgccagctcgccgagttcactcattgctcgcatgacataagactgcaatttgtctttagccagctcatttaccggcacgcacggtagacagtgaatctgcgcaagaaagccatcaacgagggttgagtcttctgtcaggtcagtcagcagccacaattcaggcggcgtgaactggtgaggctgttccgggttgagcttgttgcgtaacgtctgaacattcatacccgcacgctcggccagcttcgccatgttgtgacgttgcgcaaaagcccggcatgcttcgtcatagtggggatgtttggaaacctgaaaatcaaacatgttgcatccttacaattcacataaagtgaattaagcgccgatgacgagttgaaaacgggaatgacccaacgccttacgcaactgctcttctttccagcgtgcgtaataaatgcgaatcgggccacctgctttcttgcagcctttacggatggtgcgtggttcgattggtacacaagggttatcgccggttgtccagcggtaggcggtgcgttcagaaacaccctcaagctctgcgaattgttgcaaagtaacgattggtgcgggaactttgatgattgcgatttcagaagccatgttgcatgattccccttttactaaagattgcaattaatagccatctgtttgccaacgttcgccattaattgcctaggtttaggcttaacataactcccaaaatggagcttgtaaataggttaaagctacatgagaattgaaggtcttggtttaaacaatgaagaagtgctggacaggatttgcgaggcttacggattttctcagaaaattcaattagctagacacttcgaaattgcatcaagctctcttgctaacaggtacagtcgcgattccatttcttatgactttattgtgcattgcgccctagaaactggcgcaaatctcgcttggctactcacaggcaaagggtcacctacaaccggcaatatgaataccgacacccaaaatgtggagaaattcacattaagtgaagagtctctggttagtgatggcgatttgagtattgctggcaagttctttagcaagccgcttacgaatccaattgccgtctacgctgacggaaaactccatttcatcgagcgagacgcatccctatcagatggagaatggctcgtcgatattgaaggtgctattagcattcgagaattaacaaaattgccaggcagaagactacatgtagcagggggcaaggttcccttcgaatgtggatttgatgacattaaagcattaggtcgcgtgatgggtgtatacagcgaggttaactaatgaccgtgcgtaaaaatccaactggcggttggatttgtgagctctacccaaacggtgcaaaaggcaaacgcatcagaaagaaattcgctactaagggcgaggctctggcgtttgaacagtacaccgttcaaaacccgtggcaggaagaaaaggaagacaggcgcacgttaaaagagctggttgactcatggtatagcgctcatggcattacactgaaagatggcttgaaacgtcagttagccatgcaccatgcttttgagtgtatgggcgagccactcgcacgcgatttcgatgcgcagatgttttcccgctaccgagaaaaacggttaaagggtgagtatgcccgctcaaacagagtgaaagaggtatcacctcgcacgctaaatcttgagctagcctacttccgggcagtgttcaatgagctgaaccgcctcggagaatggaagggggaaaacccacttaaaaatatgcgcccattccgcacagaagaaatggaaatggcctggctaactcaggaccaaatttcgcaactgctcggtgagtgtaaacggcatgaacaccctgatttagagaccgtggtaagaatctgtctcgccactggcgcacgttggtctgaggccgagagtctgaggaaaagccaacttgctaaatacaaaatcacatacaccaacacgaaaggaagaaaaaaccgcaccgttccaatcagtaaagagctctatgagactctgccagatgataaaaaaggccggttgtttagtgactgttatggcgcattccggtcggcgctggaaaggacaggtatagaattaccgccgggacaacttacccacgttttacgccacaccttcgctagccactttatgatgaatggcggtaatattttggtgttgcagcgcgtactcggtcataccgatatcaaaatgacaatgcgatatgctcactttgcaccagatcatttagaagatgtactaagatataacccattctctaataaggctctaaaatgaaattaaagaaactattagaattagatttcatggttaaattcaaatccacattggaaacagaatttgaaaaagagctatttatagcaagccttcgaaattatgcctctcatggtaaccctctgagatttcacaactttgcatatactatgagagagttaattttacatgttatagctcgaaaagctcctgaagaaaaagttatcggtgcaccatggtatgtacgtatagatcctaatagaaaagtaacaaggaaacagcagttaaaatattgtgcccaaaaaaacataccagatagttttctaggcgttatcaatactacatttattgatgattccatatcagatttcttagctgagtttgttaaccttaataaatacacacatataacagaaaaatattttaaaccatcccccaagcagttttttgaaaacgcacgggatgtagtttccatcgctcagcactgtttagatttgatggccgatactgctaaggaagtaatctgtatcctagaaaatgaaatcgatagctcagttagggatttggcgaacgagagtttgccagatgaagtgactattttagctcctcgagtttacactgagtatgtacaaattgaagatgtgtatgcctctgatattgatgatgaattcatatacataggtgttgacggttcagtatttgttacacaagaatatggtcccaaagatgacctatgcgaaattaacactgattatccatttagcctttccatgcagtgcagtttgcgcaatccagctcaactaactataacttcgaaggaaatagaagtagatacttcctcttggtacgagtaagaaaacagagtggcgataaagtggcggtagaaatggcgaataatgggtaatttttggcaaacagtggcaatctatgtcaatgataaataaagcaaagtattgattttcggttgttactgtaggaactcataatcgcttggtcgttggttcaaacccaacaggggccaccaaattttagctttaaaatcatataattaagccactcgaaagagtggcttttttgttcctgaattttaaaatggcaccacaaaccgctgagcagcgcgcatggcttagcgtgttgtcgctatcccattaagaggataaaaagtccgttataacgcagggaaaatttgcgcttacgctaaaacagatagcattctgccttagcaaaatattgctcagagcatctcgggcagcccataaccgccgcactcctgttgacttctgtctaactacgcaacgtagtcttgaaatatctttcattcctgcaatgctggaattcatactactcacgataaatgtaacaacacaggtcaatttccgaaaaataaccatagcctgcgccagctgatcgaaatcaacgcgttcctccccccgctcttatatataacccgctgacttacaaaaaggatgaaatgatgaaaatacgggatatatcaatcagtacctgtctggcactgttattaatgaattgcgtagctaaaccacccatgacgacggaaaatgaaagaggccgccgcgtttgcttttaatgtcgatgcttcgcaggtgtcaatttccgatgcgaggcagcaggatgtgaaaaccaactttgtagtcaccatcggcaaaaccagccatcgctgctatgtgacgaaggccgccgagccgaagctttacaggctgatcccgctgggcggcggtagcaccgtctcggatgccatctgcgccggcgccaacccgacgctagcgagcaaaacctgcgacgccctgtcgcaaaaagcgggccgctgctgagcctttgcgcagaagaaggccgctaactgcgcatttagtcactttttctgccgttttaccgcggtcgcttagttcagcgaccgcacctgctgataagaattgagccgttcccgcagcgaggtgagccagacatccggctcctgacggcagatttcggtgaggatcggcgtcagcaccagctcggcttcatggaagtcggtccactccggcggctccagtgaaaaaggatcgttcatcagccaaatcaccatcggcgtccaggcgcgcggatccagttgcagataatcctgacagcgcatcatatctcgggtccgcgcctcatcggggacgacatcctttcccaccgcggcgcaactcattgccagtactgttattcctgccatcagatgtttccaaacccattttcgccagaaggcgcgtttttctttcgccattgttattattttacctgccagttgtcgccggacgatattcccgagagctcaccttaataagagcagattaatcgtttgcattttttttaacagcagaccgcgctgaagcaagtgaacgcccgttcctacagctgtcatccagctatgcaaatatattcgtctggctcagctccacaatatttccctggcccaaaacgatttgtgttacaattacgccttataacggcatcgataaaaataacccccgccgcacctgcaccaggcatcgcccttcttttttcatatcaggatttacgcccccatgaatgcgataatcattgacgatcatccattggcacgtatcgccattcgcaaccttctcgacagcaacggtattaccgtcgcggcagagctcgacagcggcgctcatgccgtgcagaccgcggaaagcatgcagcctgacctgctcatcgtcgacgtcgatattccagagctcagcggtatcgaggtgctggagcagctgcgcaaacgccgctaccagggaacaatcatcatcatttccgctaagaatgaactgttctacggcaaacgcagcgccgactgcggagcaaatggttttgtgagtaaaaaagagggaatgaataatatcctcgccgcaatcgacgcagccaataatggctacagctatttccccttttcactggaacgcttctgcacccacggcatcaccgatcaggaccggctggatacgctgtcaacgcaggagatgaaggtgttccgctatattctcagcggcgtcgactacaccaccatcggcagcaaaatgaatatcagcaataaaacggtaagtacctataaggtccgtctgatggataaattaggctgcagcaccctgcttgagctatatgactttgcgcaacgcaataaaatagggtgatggcatggcggttcgtcttattttatccgtcgttgtcgggctgacgctgagcctctcgcctgccgcgtatgccatgaaacagctggagctgaagagccattctcatatcgcggcgatcgatatcccgcttagcggtaaggagaaagcatggctggcggcgcagccgacgctgaccgtcgggacctggcttcccgagaggacacctatcgtctatgacggcgacgagaaaagttatcagggcattaacgccgactatctggcgctgatggcgcacagcctcggactgaaggtgattatccgccagtatgacaccgagcagcaggcgctcaccgccctggccgaccgccaggtggataccctgctcactcaggtggcgcaccgggatgccctcgccccgggcctggatcaatccgcgccgctgcttaaaacctggccgacgctggtcacctcgctgaaatcccctctgccgccgctgaccactgaccgccgcgtcacgctggcctgcacccgcgattgcgcttttttcgatattattcagcaggcgtttcccaacgccaaaatcaccctttatgatagcgactatcaggctctcgcctcggtggtcagcggcgagaatcagtattttatcggcaacaacatcaccactggccactgcatctcgaaatatttctcgcaatcgctggttatcgcgcactattttcgtcagcaggagcaacacaaccgctttgtcacccgtgacgatcggccagagctgcatcaactcttcgaccgttttatccatgccgtcgacagcgacaccgcgatgcggatcatgcaaaactggctcaaccgtggcgatctgtcgtttctcaataccccgcttacctttagccccgaagagcagcgctggctgcagaagtatcgtcgcgtccgcctgctggtgaacccctattttccgccatttaccctggtggataacgaggatgaactgcgcggcatcatggccgatatgctgaatattgtctcactccagaccggcctgcagtttgaccctattctggtgcgcaaccgtcaggctctggcaaagcgcatggaaaaagaggactgggcgatcatgcccgccgccaccctgaccccacagccgcaggcctacgtcaccctcagcgatccgcttattaacgtggcctttgtgctggtcgcccgcggcagcgcccccgaccagcatctgctgacgcgctcggcacggatcgccctgccggtcgggcctatcgccgcccatgatctgaaagcgcgttttccgctgattaactgggtggaaacggataatgttggcgtcgccatgaagatggtagaggaaggcgaagtggatgccgccgtagcctcggagctttccgcccgctatatgatcgaccactactatccacagggtctgcactacacccgcattgatggactccccgtcgcggccattcggctggccatcccgcgcgatgaaccggtgctggccgccattcttaacaaagcgctgcaggttattccgccacgggatattctgcagatgaccgagaagtggtcgaaaatctccagtcagcaaatagagaactggagccagtacagccgccagttttaccagctgatcgcctttgcgctggtgctgatcgccatcagcctcggctggggactctccctgtgtcgggaagtgcgcaaacgtaaagactcccagcagcggctcgaggaggagctggcgcagaaggaggccctctcctgtgcgctggagcgcgaaaaagacaaagcgattcaggcgacaaaagccaagagccgctttctggccagcatgagccacgagctgcgcacgccggtgagcgccatcgtcggctttctggagctgctggcgaaacctgagctgaacgtcggccagcgtaaagaggcgatcgagctggcggggtcgacggcgcaaaccctgctgggacttatcggcaatattcttgatatcgacaagattgaatcgggaaaataccaggttaccccgcagtggagcgatgtcgcacagttagtgtcgcagcagtgtcataccttcgacgcgctggcgcagcaaaagggcatcgatctgcactaccataacgcgctgcaggaagggaccatgctgtgggtcgacccgcaggcgctacggcaaatcctcaataatctcatcggcaatgcgctgaagtttaccgtcgaaggcgcaattcaggtctcctgccggctgacgctggcgaatgagacacagggagagctggccctcatggttagcgacagcggctgcgggatcagtgaagcagagcaggccaccctcttccaccgctatgcccaggcgcgccagggacgccagcagaccggctccggactggggctggtcatttgcaaagagctggttgcgctgatgcagggtcgcctggagatggtcagccgtccgggcgtggggaccactttcaccatcacgctgccggtcaaggcgagccgctgcgcgatccacgcgccgcagtcgtcgcccgccagaccgcaggctctacccgggctggcgatactgatagcggacgatcaccccaccaaccggctactgctcaagcgccagctcagcactatcggctatagcgtcgatgaagcctgcgacggtgaagaggcagagaataagctcgccagcaaacattacgatctgctgataacggacctcaatatgccgaagaaagatggcctggcgctggcggcctcgctacgccgtcgctatccgggcctggtaatttggggcgtgactgccagcgcactgccgcagtcgcgggaggcgtgtctggccagcggcatgaatatgtgtctgtttaagccggtgtcggtccagacgctgagtcatgagctcagccgtttagcggtgggccgcgcatcacctcacgctacccggcacctgaagctcagcgtgctgagcgagaatacggggggagaccaggcgctgatgaatgagatgctggagacgttccgcgatgcgtcggccgcggatttacaggctgccggacaagcaatcgcccggcatgagccgcagatctttctgcgggcgctgcaccgtctgcacggttcagcacaaattctggggattactgcgctacaacaactgtgcgccccttttgaggcaaagcggcctgattcgctgacgccggcaagctgtctggaggtggtacagcgcatcaccggcgtcatgcgcgagatcgatggcgaaatcgacgccctgatcggccgctagccgttccgctcgggcagtccgcctgcccgagcgttaaggggacatccttgtcagttttttcctctgcgctctctcagggtggaacaagtatcagttgcctgccaccagcatctcgctatccaccacaatgccctcttcagcgcccttcagcaccagattcgcttcgtaatatttaccggctttcagcagttcttgcgactgcgctaccgccttacgggtctggttaagcggcatcagatactggttctcaatcacgccaataccggccaggcgcagggtatcgatagcccctttctgatcgcctttcgccagcttttcgttggcggattggatagcgctctctttttccggcgtggccacatagtcttcagacagggcgatagaggcgttaatgatcacatagcgatcggcgatcattttggctttagcatcagttttcacaaacttcgcccaactggcatcatcggcggccagcagcgcggcggcgtcgtctgtcagttttttggcgctatccggctggccatggaacagcgccagacgggcgaactggatgtcgcgcatcgcattcgcgccctgcaccgccacctgcagcacatcggcggcttctttctgtacctgcgtcgtggctgccgcggctggcgctgccgtcgcgctatctgttgcccataccggagaggtactcatcatggttgccagcaggctcgccagaatgacttttttcatcgttgactcctgattaaaatcggtaagcatcaccaaacgcagccagcttaaaaaatatcgcgggcattgagaatcagagcccggaagtaatattgcgggcctggtctgacagctgtcagaccaggcgtataaagtgacctcggcgctcttatttacgcctgccgatcgcgcggcctactattttcctcagacctttcttttggcccgctgaataaaccctcacgctttttattcagcgtcaggccgccaaccgggatctgcggagcaattatgtttatgtttagccattacaccttaaatgcgtttagcccacgcgtcttcattcgatataaacggcatgcctgcctgatggcggtattgctgtttatctgcggagcctgttgtctggcctggccgttggtcgccggctggtatctcgccacagtaaccggcatgttattgatgatctgcggcttctattcgctgtacagcctgattgtcttccgccagcagcactggaaatcacgcctggtggcgctgatcttcgccatcgcctggatcgtgctcggcctgagctttgtcgtcaatcccctcaacggtatgagcagtctggccattttatttggctttttatttgttctcggcggtatttcccgcatcgttaacggatgtcaaacccgcaaacaaagcggcgctggctggaatatttttatcggcctgttggatttacttatcgcctgcctgtggctggccatgaacccgcagcaaagctggttatttattaccgcctttatcggcgttgaaatgatatttagcgccatcggcttgttggtcctgcgcaataaaatgaagcacgctgaggcttaagccctattttgacactggagaagaaaatgaatttacctaaagcactcgtattgaccgtggcggctaccacattctgtctgatgaccagcccggcgttcgcggttgaggaaaccacgccgcagaatatgacctgtcaggaatttatggatatgaacccaaaaagcatgaccccggtggccttctgggtagtgaatcgcaacaccgactttagcggcggcgactatgttgactggcatgaagttgagaccgtttcggtaccgaaaatgctgcaggagtgccacaagaaccccgcagctaaacttggcgatctcagcgcggtcatcaaaaaataacccccccggcatcaggccggggaaacccgccgcgctgcggcgggtcctgctttactcatcgataccgcattcgcacggcagatggcggccgataagcttgcgatacaaaaacgccccgataatcgcccccaccaccggcgccagcagcggcaccagaaagtaagggatcgccagcccaccggtaaaggcgatcgagccccacccggccagactggtaaacagttttgggccgaagtcgcgcgccggattcagcgcaaagccggttagcggccccatcgacgcgccgagcacggcgatcagcaagccaatcagcaacggcgccagcggcccgcgcggaattccgttgccgtcgtcggtcagggccatgatcatcgccatcaggattgccgtgatggtggtctccacggcaaacgcttgtataaaagtgatatgtggatgcgggtacgtggaaaagaccccggccaggttaagactggcggcagtgccgcgcacgatatgctgactctgttcaagatcgagaaacagctggcgatagagcccatacaccagcgcggcggcgcagaaggccccggccgtctgggcaacaataaacggcagcaccttgcggcgttcaaaacaggcgaacagccacagggcaatggtcaccgccggatttaggtgcgcgccggagacaccggccgtcaggtagatggccatggcgacgccaaggccccagataatactgatctcccactgaccaaagctggccccggcgacccgcagcgcagcgacgcagcccgcgccgaagaaaatgagcaatccggtgccaagaaactcggccacgcactgcccggttaaggtagaagtctggttcattatcggcatcctgaaatagcacgttaaagagagaggctggcgcgagcgcccgtttaattcgcctgaccggccagtagcagcccggtggcgaccgcattgcgcggcccttctgttccccgaatattgccctgcccggcgaccacgccatagtgcgacaaggcttccgtgataagctgcgggatctcaaagtccagcgatgagccgcccaccagcaccacaaaggcgatatcgcgaatggaaccgccgggtgagacctggcgcagcgcgcgcaggcagttggtgacaaacactttctctttcgcctgccggcgcacgagacgaattttttccagcgggctggcgttatcgatcggcaccagttcgccctccttgatgtacaccactttggcgaacaccgccgggctgagggcttcccgaaagaactccaccgcgccattctcgtgacgaatactgaacaggctttccactttggccagcgggtatttttttatcgcttccgccagcgaaagatcctcgaggcccagctcggttttaatcaacaggctgaccatattccccgccccggcgagatggaccgccgttatctgcccctccgcgttgacgatcgccgcatccgtcgagccggcgccgaggtcgaggatcgccagcggcgccgcacagccgggagtggttaacgccccggcgatggccatgttggcctccacgccgcccaccaccacctcggtctgcagtcgggcgctcagttcgcgggcgataacctgcatttgcagacgatccgctttcaccatcgccgccatcccgacggcattctccatggcgcactcgccggccatcccgccctgcaccttgcgcggaataaacgtatccaccgccagcagatcctggatgtatatcgcgctcatctcatggccggtcagggacgccattaccttgcgcacccgctcaagcatgccgccggcgtgggtgcccggttcgccgcggatgtcgcgtaccggagcgcaggcgctcatcgcctgcatgatggcttccgcgccctcggcgacatcggcctctccgcggcgcttttcgccgctaatgtagaggttgcccgccgggatcacccgcgactgcacatccccctgcggggtcttgagcaccaccgctgaacggttgccaatcagggcgcgggcgatggggacgatggcctgggtctcttccgggcttagcccgaagaaggtggcgatcccgtagggattcgacaggatccgcaccacctggcccggcgcggccacttccaccgccgccattaccccctcggggacctgctccagcagcgtcacttcatccaccaccggcagggttttacgcaggcggttgttcaccagcacgccgtcgtcctttttgaggatcgccgccaccacgttgatcccccggtcgagcgcctcattgagccaccacacggcgtcaaggaaatcgacggcgtcgtcaatcagtacgatccacccctcggcatactgcgccgccggcagcgtcgccagccgcccgagggcgatagtcgtccccacgccaacgcccaccccgcccggcgtctgcgggttatgaccgatcatggtcgattcggtgataatggtctcggtgatggtctccatcgccacatcgccaatcaccggcgcggcttcgttaagatagatgcgagagacatcgctcatcgaccacggtgttttcgccagggcctgctccagcgcggcgagggtcccggcgatattgtcccgcgtccctttcatgcccgtcgtcgcgacgatcccgctggcaacaaacgccctcgcctgcgggtcatcggacgccagcgccacctcggtggtggcgttgccgatatcaatcccggctattaacggcatgctgacctccgcttagcttcctttacgcagcttatgccgctgctgatacacttccgccgactcccggacaaaggcggcattcactgtcgcatgccaggtgtgctccagctcgtcggcgatcgccagcagctccgcctgcgaggagcggaacgggcgcagcgcgttatagatagccagaatgcgctcgtcaggaatggcgataagctccgccgcgcggcggaaattgcgcgccaccgcatggcgctgcatctgctcggcaatctgcgcctggtactcaagggtctggcgggagatccgcacatcctgcgggcccacctcgccagagagcaccttctcgagggtaatatcggtcaatggtttgccggtaggcgtcaggatatgctccgggcagcgggtggctaacggataatcctgcacgcgcatggttttctcgctcatggtcactcccttactaagtcgacgtgcagggtgacgggctcggcgtcctgcaccacatgtttggtctctttgatatgaaatagcgcggctttggccataaatttcggccgcaccatctgatcgttcaccaccggcaccggcgaaggtgactctttgcgcgcatagcgcgcggcgtttttgccaatctgccggtaggtctccagcgtcagcagcggcgcctgggagaacagctccaggttgctgagcggcagcagatcgcgctgatggatgaccgtggtccccttcgactggataccgatgccgatccccgagccgctcaggttggccgcatcccaggccataaaggagacgtcggacgtgcgcagaatgcgcaccacccgggcgtgaagcccctcttcttccaccccggcaatcagctctttgaggatcgcgccatggggcatatcgatcagagtgtgatgctggtgtttatcgaaggcagggccgacgccgatcaccacttcatcggcacgttcatcggcagaagctaccccgccctcgcgggttttcagggtaaaagagggctgaatttgagttgtctgttgcacaggaataccgccttattcaatggtgtcaggctgaaccacgcccggaatatttttgatctccgcccagcgttcggcagagatgcgatagccggtgcccggcccctgatagtcattgatgtcgttgaccgcgctcaccacctcgaactgtcgatcgagaatggccgaggtctgcaggtaatcgccggtgacccgctggcgcagcatattgagaatattgctggcgatatcctcaaagccgctgcggctcagcgcgccgacaatatcgaggccggtgatgttgcgcttcatcatctcttccaccgcactcagatcctccaccacgttacgcggcggcatctcgttgctgccgtgcgcgtaggtggcggcctccacctcctcgtcggcgattggcggcagccccagctcgcggaaaaccgcctggatcgcccgcgccgctttctggcgaatggcaatggtttccgcctcggtcaccggacgcaggccgccgtcaaccatcaggtcacgctgcagaatgttgtaatcatcaaaatcttccgcatcgaagttcgagccggcgaacatgttgtcgtagttcggcaccgcgctgtagccggagaaaataaagtcggtgcccggcagcatctgcatcagggtgcgcgcggtgcggcgaatatccgagtgggagaaagtctggtcgttggcggacgccacttcgaggtcgagcatagaggcgatcaggttttccgccagcaccgcccgaatgcccgacggcacagcgccggtcatgccgatacagctcactgcgccgttttgcagcccctgaaccccggcgcctttggtaatgaagatgcagcgcgattcgaggtagagcatcgacttgctctccgaatagcccatcagcgcttcggatccggtgccggaggtgtagcgcattttcaacccgcgggaggcgtaggccgaggcgaggaacgcctttgaccacggagtatcatcgccgtcggtaaataccgcttcagtgccgtagaccgacaccgtctcggcgtagctggttaagccacgcatgcccagctccagctcggtggcctcttccaccgagcactgcgtcaacacgccgggacggccgcactgcgagccgaccaacagcgccagggcgttaaacggcgcatagcgcgcgataccgaccgtggtctcctgttctgagaagccgcggatcccggcctcggcggcgtcagcggcaatctgcaccggattatctttgagattggtgacgtggcactggttggagggggtccggcgggcacgcatcttctgcagcgccatcatcatctccaccacgttcatctgcgccatcacctcgaccgctttggccggcgtgatggcggtagtgatggcaatgatctcctcccggctgacgtgaatatccaccagcatgcgggctatttccaccgcctccaggcgcattgcctgctctgtgcgctcaacgttgatcgcgtaatcggcgataaaccggtcgatcatgtcaaactggtcccggcgtttgccgtccagctcgacgatcagaccgttgtccacttttactgaagagaccgggtcaaaggggctgtccatggcgatcagcccctcttcaggccactcgccaatcagcccgtcctgattgacggggcgctgggccagtactgcaaatcgttttgatcttttcattgttcatcggctcaaaaggtgaaatccgcagacggtagcgaatacgccgggccagcgtcgttgccgcccggccattaccggcaatagcggaactttaaatgagccagtggtgaaaaaaataaatttaatttcgtttcaatttggcacacgaaatctaccgacagtttcactatgaaactttactccggcggcaaaaataaaaaatgtgatcgcccgcaatgatataaatcaattaataaaaaacgcccttaattacgttttgccgacgctattttaaccctattgactaaatcatggcgggtgacaaaataacgctgacaaaaataaagcaagccaaccgaatggtaatagttttttactatcgccccctactgactattcgcgccagcgttatcctggtgcgggagagaatgatgaacaagagccaacaagttcagacaatcaccctggctgccgcccagcaaatggcggaggcggtggaaaaaaaagccgctgagatcaacgtggcggtggtgttttccgtggttgaccacggaggcaacacgctgcttattcagcggatggacgaggccttcgtctccagctgcgatatttccctgaataaagcctggagcgcctgcagcctgaagcaaggtacccatgaaattacgtcagcggtccagccaggacaatctctgtacggtctgcagctaaccaaccaacagcgaattattatttttggcggcggcctgccagttatttttaatgagcaggtaattggcgccgtcggcgttagcggcggtacggtcgagcaggatcaattattagcccagtgcgccctggattgtttttccgcattataacctgaagcgagaaggtatattatgagctatcgtatgtttgattatctggtgccaaacgttaacttttttggccccaacgccatttccgtagtcggcgaacgctgccagctgctgggggggaaaaaagccctgctggtcaccgacaaaggcctgcgggcaattaaagatggcgcggtggacaaaaccctgcattatctgcgggaggccgggatcgaggtggcgatctttgacggcgtcgagccgaacccgaaagacaccaacgtgcgcgacggcctcgccgtgtttcgccgcgaacagtgcgacatcatcgtcaccgtgggcggcggcagcccgcacgattgcggcaaaggcatcggcatcgccgccacccatgagggcgatctgtaccagtatgccggaatcgagaccctgaccaacccgctgccgcctatcgtcgcggtcaataccaccgccggcaccgccagcgaggtcacccgccactgcgtcctgaccaacaccgaaaccaaagtgaagtttgtgatcgtcagctggcgcaacctgccgtcggtctctatcaacgatccactgctgatgatcggtaaaccggccgccctgaccgcggcgaccgggatggatgccctgacccacgccgtagaggcctatatctccaaagacgctaacccggtgacggacgccgccgccatgcaggcgatccgcctcatcgcccgcaacctgcgccaggccgtggccctcggcagcaatctgcaggcgcgggaaaacatggcctatgcttctctgctggccgggatggctttcaataacgccaacctcggctacgtgcacgccatggcgcaccagctgggcggcctgtacgacatgccgcacggcgtggccaacgctgtcctgctgccgcatgtggcgcgctacaacctgatcgccaacccggagaaattcgccgatattgctgaactgatgggcgaaaatatcaccggactgtccactctcgacgcggcggaaaaagccatcgccgctatcacgcgtctgtcgatggatatcggtattccgcagcatctgcgcgatctgggggtaaaagaggccgacttcccctacatggcggagatggctctgaaagacggcaatgcgttctcgaacccgcgtaaaggcaacgagcaggagattgccgcgattttccgccaggcattctgactgttaacgagggggccgtcatgtcgctttcaccgccaggcgtacgcctgttttacgatccgcgcgggcaccatgccggcgccatcaatgagctgtgctgggggctggaggagcagggggtcccctgccagaccataacctatgacggaggcggtgacgccgctgcgctgggcgccctggcggccagaagctcgcccctgcgggtgggtatcgggctcagcgcgtccggcgagatagccctcactcatgcccagctgccggcggacgcgccgctggctaccggacacgtcaccgatagcgacgatcatctgcgtacgctcggcgccaacgccgggcagctggttaaagtcctgccgttaagtgagagaaactgaatgtatcgtatctatacccgcaccggggataaaggcaccaccgccctgtacggcggcagccgcatcgagaaagaccatattcgcgtcgaggcctacggcaccgtcgatgaactgatatcccaactgggcgtctgctacgccacaacccgcgacgccgggctgcgggaaagcctgcaccatattcagcagacgctgttcgtgctgggggctgaactggccagcgatgcgcggggcctgacccgcctgagccagacggtcggcgaagaggagatcaccgccctggagcggcttatcgaccgcaatatggccgagagcggcccgttaaaacagttcgtgatcccggggaggaatctcgcctctgcccagctgcacgtggcgcgcacccagtcccgtcggctcgaacgcctgctgacggccatggaccgcgcgcatccgctgcgcgacgcgctcaaacgctacagcaatcgcctgtcggatgccctgttcgccatggcgcgtatcgaggagactaggcctgatgcttgcgcttgaactggctggcgtcaatatcgtactgcttcattttgcgccacagggtggtgcggccgatattgagcagctgcgacatctcctgcacccgcccgctggtcacccgggcggcgtgaataatagcttccttttcgatggcgctaaaggtcaggctggccggcagcagcgatgacgcgctatccccgcccggccgctcggaaaagagatattccggcagattactcaggcgaatgtggccgttgtcgctgctgatggcgatattctcaatgacgctgttgagctcaaaatcattccccggccacgagtaggccaccagctgcgccagcgcgtcatcgtccactttcagtcgcgaagagaaacgcttctccaggctcttcaaccggttatgcaccagcgacggaatactgttgcgtcgggcgcgcagcggcgggatgacgatctcaaaggagtgcagcgcatagtacagctggcggctaaagcggttctgttccaccagattggccagatcgacggtggtggtggcaatcaccttcacatccaccgggatcaggcgccgggcgtcgaggcgggtgagcacgccctgcttaatgacctgcagcagggccgactgcagctccggcgccagatactcgatcttttccagaaacagggtgccgccgttggccagctcaaggcggctcaggcgaccattttcatcgtcggtaggggcgctgcccataaagtcctggcccagcacgctgtcggcatatagctggcagttgacggcgatataggggccgcccgcccgttcgctttcattgtggatagcctggctcagcagctctttcccaaccccctcttcaccgcacagtagcaccgggaagccgccgcgcgccgcctggcggccaaagtggatcaggcgtcgggtttccggatcgtcggcagacatctgctcaaaggtgtggctgactttaccgagctggctggtcatcagctgccgcatctgctccaccggatgcagcagcagaataaaactgttgccttgcgcctcgacaatcggttttaaggtgatcaccgcgtcgacaaactgatgctgactttcaaaggtgacttcgacgtgattcaggccgcgggcgtgtttgatggcgcggcgcagcagcgccgggagggtcaccagatcggcgatatttttcccctggctggcctgagcatcaagatgcaacagtctcgccgcctgaacattgagaaactgcagcacgccctgttcgttccacgccatcaccccatcgtccatgctctccagcaggccgtacatctgattgaggtgacggttggattccgccagcaggctgtcggtaagcagggagttacccacctcgcgggcgatggccagcgtcagggagaggtcggcgctggactggtgctcgaccagacagcaaagcgagatagagccgaacagccgcccgtggttatcaaacaccggcgtcgagcaaaaactccatggctgtagcgcctgcttaaaatgccgatcgccggcggtgttgatcggctggccctgcatcgcggccagcgacagcgcgcaggtgccgataatgctctccgcgcagtagctgccgtcgcgaaatcccagggcagccagctgggccagggtttgcggctcgccgcaacggctcaggatgcaggcggactcatcaagaataaacagcgcgcaggggcggccgtccataaactcccaggcgtcttccagcgccgcctggccgatggtgagcagcgcggttttacgccgacagatggagtcgaaggtcaggccctgggcctggtgcggcgtttgccaggtttcgcgctgcataaacttgctgcagcggtgccatgactgggcgatgacggaagagaccgccttcccggtatcctgagtctgaacagtcatatccttttccgcgttgtaccatagagaacccctccggcagcgactgccggaggggagaaagaaaaaccgctgacctgggccagcggtttagccaccgcgaattaacgcgccagccactgctggcctaacagatcggcggtgaggatagcggcatggacgctctccggggtcaccgcaaacggcatattatggatggtttccccttccgcgcaggtagctttcgccaccgcggcgattttctcgtcgatcccctctttgacgcccatctgcgcgagcgtcaccggcaggccgacgcgctggcagaagcccagcaccgtttcaatctcgtccatcgggctgttctgcagcaccagctgcgccagggtaccgaaggccactttctcaccgtgatacaggtgatggcactcttcaagaatggtgaaaccgttgtggattgcatgggcagcggccaggccactgctttcaaagccaatgccgctgagataagtgttcgcctcgatgatgcgctccagcgcttcggtcactaccccggcctgcgccgccagacgggccttttcgccctccgccagcagcgtatcatagcacaggcgggcgaggctcagcgccgcctcggtggactgtcctccggccatgctggtggcgcgcgcatcgtagcaagctttggcctcgaaccaggtggagagcgcatcgcccatgccggagaccagcaggcgtaccggcgctttggcgataatcgccgtgtccatcaccaccatatccgggtttttcggatagatcagatactcttcaaactcgcccgcttcggtgtagatcaccgacagcgcgctggttggcgcatcggtcgaggcgatggtcgggatcaccaccaccggcagcttctggtagtaaccgatcgccttcgcggtatcgagagttttaccaccgccgatcccgaccacgccgcggcagccctgtttttgcaaaatcgccatcagacggttgatttccgcatggctgcattcaccgttaaaccgttccgcatggcagcgaatatcgtggctctgcaggccattcaccactttctctcccgccagcttcattacgaaatcgtcggcgatgacgaagaagctctccgccaggtttttggcatattgaccgaacagaacagcagcatcaggaccctgaagatatttggctggagattgaataacttttagcattcctttcaccctcaaataagtgcgcatgtaaacatgatgagccctggcgttatccgcgccggccagtgaagcgcggcctgaacggagcgtaccggagcagtgcgatcactgtagggccggcagggaacaaaaaaatctttcgcctttttgttctgatatgaaacacaggttaattttttacgttccatattggaacaaaaaaccctaatctctgtcaggattgcgatcccgatccgctcctttgccgcataatgcccttacaatcctccgtgtttgaccgccttttctcccgcagtcggcagaaaatcagcaaaaaattttttcccacccgcttcgccggctatcctgaccgccgcttatggcagaagaaaaaaagcgcgccagctcgcattttcaccatatcctcagcaaaaacgttccataaagaaacaaaatcaggaagcaatgtttcgtaatgaaacccgatcgtcgaggcattctttttttcgtccgctcagccagaatcatcatatcgccaggcacgctccaccgtcagacgatacccctacgcgatgaccgcctccgccagcagagaggcggcatcgaaccttctccaacggagcactgaataatgaaaaagctgattaaccgtgttgaagatgtactgaatgaacaattacaggggctggctaaagcccatccgcagctgaccctgcatcaggacccgctgtatgtgacccgcaccgacgcgccggtggctggcaaggtggccctgctctccggcggcggcagcggacatgaaccgatgcactgcggctatatcggccagggcatgctctccggcgcctgtccgggggaaatcttcacctcgccgacgccggacaaaatgtttgaatgcgcgatgcaaattgacggcggcgaaggcgtcttgctgattatcaaaaactataccggcgacatcctgaattttgagaccgccaccgagctgctgcatgagagcggcattaaagtcaccaccgtggtggtcgacgacgacgtggcggtgaaagacagcctctataccgccggtcgtcgcggcgttgccaacaccgtactgatcgaaaaactggtcggcgccgccgccgagcgcggcgactcgctggaagcctgcgctgaactgggccgccgcctgaacaatctcggccactcgattggtatcgccctcggcgcctgcaccgtaccggctgccgggcaaccctcctttacgctgaaagatgacgagatggagttcggcgtcggcattcacggcgagccgggcatcgaccgccgccgcttcagctcgctggaccaaaccgtcgatgagatgttcgataccctgctggaaaacggcgcttacagccgcacgctgcgccagtgggataccgtcaagggcgcgtggcaggaagtacagcagagcaaaaccgcgctgcaaaacggcgaccgggttatcgcgctggttaataacctcggcgccactccgctttccgaactgtatggcgtgtataaccgccttgcccagcgctgcgaagcgtccggcatcatcatcgaacgcaacctcatcggcagctactgtacttcgctggatatggcgggcttctccatcactctgctgaaagtggatgacgagacgctgacgctatgggacgccccggttcacaccccggcgctgaactggggaaactaaggagcacgacatgtcactgaacagaacgcaaatcgtcgactggctgtaccgctgcggcgatattttcaccaaagagagcgattttctcaccggcctcgataaagagattggcgacgccgaccacggtctcaatatgcaccgcggtttcagtaaagtggtcgaaaagctgccgtcgattgccgataaagatattggctttatcctcaaaaacaccggcatgacgctgctctccaacgtcggcggcgccagcggcccgctgttcggcaccttcttcattcgcgccgcgcaggtgacccaggcccaccagagcctgacgctcgacgagctgtacctgatgatccgcgaaggtgcggacggtgtcgtcaatcgcggcaaagcggagccaggggataaaaccatgtgcgacgtctggctgccggtggtggactccctgcgccagtccagcgagcagcacctgtcgatcgccgccgcgctggatgccgcctgcgaagtggccgagcgtgcggcccacgccaccatcactatgcaggcgcgtaaaggccgcgccagctatctcggcgagcgcagcatcggacatcaggatcccggcgcgacctcggtgctgtttatggttcagatgctggccgccgccgccaaagagtaaggaaattgcgatggtaaacctggttattgtttctcatagcgcccggctgggcgaaggtgtcggagaactggcccggcagatgttaatcaacgatggctgcaaactggcgatcgccgccgggatcgacgatcccgacagcccgatcggcaccgatccgcttaaagtcatggaggcgatcgaatccgtggccgataccgatcacgtgctggtgatgatggatatcggcagcgcgttgctcagcgccgaaaccgccctcgatctgctcgatccggcgattgccgcgaaggtgcgactgtgcgccgcgccgctggtggaagggacgctggcggccaccgtcagcgctgcctccggcgccgggatcgacaaggtgatcgccgacgccatgagcgccctggaggccaagcgggttcagctgggtttaccttcgccaacttctgacgccgcgccggcgccgatgcttgccgacgacggcgacacaaaatcggtgtcagtcattattaacaatcataacggcctgcacgtgcgtccggcgtcgaagctggtcgccgcgctggcgggctttaacgccgatctgctgctggagaaaaacgggaagtgcgtcaaaccggacagcctcaaccaaatcgcgctattgcaggtccgccgcaacgataagctgcgcctgctggcccgcggtccggatgccgacgcggcgctggcggcgtttcaggcgctggccgccgataacttcggtgaatcgcctgcggcgcaaccggcagcggctccggcaacgcccgagcgcgtcgaaggcgctgccctgcgctatccgctggccctgatccagccgctccgcccggctgccgccgatgccgcccgcgagcagcagcgcctgcgccaggccattgaccagacgctggcggatcttatcgccctgaccgagctggcggaaaataaatttcacgccgatatcgcggcgatcttcgccgggcaccacaccctgctcgacgatgacgatctgtttgatgccgccaacgatcgcctgctcaccgaacaatgcacggcggaatgggcatggcatcaggtgttgatggagctcagccagcagtatcgccagctggatgacccctacctgcaggcgcgctatatcgatatcgaagatattttgcagcgcaccctgcgccatctgcagggcgttcaggagagagtgccgacgcccggcgagccaacaattattattgccgacaacatttatccctcaaccgtcttacagctggatgccagcttcgttaaaggcctgtgcctgcgcgatggcagcgaacaggctcacggcgcgattatcgcccgcgcggcggggatcgcctggctgagccagcagggcgaggcgctgaacagcgtgcagcccggcgagactatcgtgctcgatatgcgccaccagcgccttatccgtgactaaaattcacgttgaccgttaccgctccgggggcctgcctccggagggtgagttttcgcttactcttcaggaaccactatgtctcaattcttttttaaccagcgcgccagcctcgtcaacgatgtgattgagggtaccattatcgccagcccgtggaataacctcgcccgtctggagagcgacccggcgatccgggtggtggtccgtcgcgatctgaataaaaacaacgtggcggtgatctccggcggcggcgccggccatgaaccggcgcacgtcggctttattggtaaaggcatgctgaccgccgcggtctgcggcgatctgttcgcctcgccgagcgtcgacgcggtgctcaccgccattcaggcagtgaccggcgaggcgggctgcctgctgatcgtcaaaaactacaccggcgatcggcttaacttcggtctggcggcggagaaagcgcgccgactcggctacaacgtggagatgctgatcgtcggcgacgatatttcgctgccggataacaaacagccgcgcggcatcgccgggaccattctggtgcataaagtggcgggctatttcgccgagcgcggcttcaacctcgccaccgtcctgcgtgaagcgcaatacgccgccagccataccgccagcatcggggtggcgctggccagctgccacctgccgcaggaagccgacagcgcgccgcgccatcaggccggtcacgccgagctgggaatgggcatccacggagagccaggcgcctcgacgatcgccacgcaaaacagtgcggaaatcgttaacctgatggtggaaaaactgaccgccgccctaccggaaaccggccgcctggcggtgatgctcaataacctcggcggcgtgtcggtggctgagatggcgatcctgacccgcgagctggccaacaccccgctgcaggcgcgcattgactggttaataggcccggcctcgctggtgacggcgctggatatgaaaggcttctcgctgaccgccatcgtgctggaggagagtattgagaaagcgctgctttcggatgtggaaaccgccagctggcagaagccggtgcagccgcggactatcaacgccgtgccgtccaccctcgacagcgcccgggtggattttacaccctcggccaacccacaggtgggcgattacgtggcgcaggtgaccggcgccctcatcgatcttgaagaacatctcaacgcgctggatgccaaagtaggcgacggcgataccggctccacctttgccgccggggcgcgcgagattgccgagcggctcgagcgtcagcagctgccgctgaacgatctgccaacgctcttcgcgctgatcggcgaacgcctgacggtggtgatgggcggctccagcggggtattgatgtctatcttcttcaccgctgccgggcagaagctggggcaaggcgccagcgtggccgaggcgctgaacgccggtctggaacagatgaagttttacggcggcgccgatgagggagaccggacgatgatcgacgctctgcagccggccctggcggcgctgctggccgaaccggagaatctgcaggccgctttcgccgcggcgcaggccggggcggatcgcacctgccagtcaagcaaagccggcgccggacgcgcgtcctatctcaacagcgatagcctgctcggcaacatggaccccggcgcccacgcggtggcgatggtgtttaaggcgctggcggaacgctaagccttccccggtggcgctgcgcttaccggggcgatgtaacaccgccgaatagcaggtcgggtaaggcgtaagccgccacccgacaaaaaacggcaccgccggtagcccggataaggcgcgacgcgccgctatccgggttttaccacgatggctttttacttgctgtgccagtacgcctgggaacgcaccagctgctgatcgatgctctcgtcttcaaagcgcgccagcagcgatttcaccaccgcgccttcgccggtcagccagataaaataatcctccgccggcaccttcacctgcgccagacgctcggcgacgaaggccggattgtggcccaccacccactcgatgttaaaaccgtcgagatccgccagataatctttatacgacgcatcggcgatagtaacgatggccgtcacctgcggcctcgccggcagctggcgtaatcccagtagacgacggcgcagcgccggcatgccggactcatcgcaaacatacagctgccaggcataatcttccggcaccaccagcgagccgcgcgggccgccgatcaccagcttatcgcccacttttgcttccagcgcccaacggctggcgataccgccatcgtggatatagaaatcgtaagccagctcgtgacgttcggcatcgtacagcggcgtatagtcgcgggtggcaggccgcacgccttccccccagtcaatcccctcctcggtcacctgcggcggggtaaatgccgcgcccggctcggggaaaaaaagcttggtatggtcgtcaaagccgtgagaggcgaagccttccagcgcctcgcctcccagcacgatacgctggaacgccgcgcctgcgcgctccacgcgcagcaccgtcagctcacggaaacgcagctcattgcggacacgctgcgggtacttgtctgctttggtttttgtcatcatcgattgccttcgtgaacggtaaatagatatatctaaacttgatgcaaatgataatgattgccaactaataagaatgcaagtctttttttgatatagtcaaaacaaaccgcatcaaaatccacagtcagaaaataatttcatatatatcaatatattaaaaaataaatagcaaccagcattgcgaacattcattttttagatataaattagatatatcaaaaacagcaggaggtaaccatgcgacatcatcatgaagaagggcgtgggccacgcgggcgccacggtgatcccagcgaacacggcgaccatggccgccgcggcggcggacgtcgccagcgtttctttggccacggcgaactgcggctgatcattctggatatcctcagccgcagcgccagccatggctatgagctgatcaaagagatcgaaacgcttacccaggggaactacagccccagcccgggggtgatctatccgacgctggatctgctccaggaccagggccttatcagcgtggaagacgacaacggacgcaagaaaatccttatcagcgaggaaggaaaacagctgcacgccgagaaccaggagcacctggcccatatccaggagcgcctgcaggcgcggatggtcggctgcgagctgcgccgcgatccgcagatgaagcgcgcgctggaaaacttcaaagcggtcctcgacctgaaagtgaaccagcaggccagcagtgccgcccagctcaagcagatcatcggcattattgaccgggcggcgatggagatctctcagctcgactaagcctcttttttcaccaccggctgccccgcgctggggcagcccgcaccacggcggatcgccccgtccattgccgccaggcagaaaatctcgtcagctcaggaataaaacgtgccaatagtggcgcaatgagattaaattttacacaattcgtcttttactttgcatttatcccgattttcaccgcttctgccgaactggcgtaatccctgcaatacttaatccagtatcgtgtgatacgtccgccccaggagcacattttgaacaggttaccttccagcgcatcggctctggcctgcagcgcacacgcactgaatctcattgaaaagcgcacgcttgatcatgaggaaatgaaagcacttaaccaggaggtcagggaatactttaaagagcatgtgaatccggggtttttagagtatcgaaaatcggtcacagccggcggggattacggagccgtagagtggcaagcgggagggttaaatacgcttgtcgacacccagggacaggagtttatcgactgccttggtgggtttggcatcttcaatgtagggcaccgtaatccagttgtggtatccgccgtcgagaatcaactcgcgaaacaaccgcttcacagtcaggagctgctggacccgctgcgggcgatgctggcgaaaaccctggcagccttaacgcccgggaaactaaagtacagtttcttctgcaacagcggtaccgaatcggtagaggcggccatcaagctggcgaaagcctatcagtcgccgcgcggtaaatttaccttcatcgccaccagcggcgccttccacggtaaatcgctgggcgcgctgtcggccaccgcgaaatcgaccttccgcaaaccctttatgccgctgctgccgggcttccgccacgtgccgttcggcgatatcaacgccatgcgcaccatgctgagcgagtgcaagaaaaccggcgacgacgtcgcggcggtgatcctcgagccgattcagggcgaagggggcgtgatcctcccgccaacggggtatttgccggcggtgcgtaaactgtgcgacgagtttggcgcattgctgatcctcgacgaagtgcagaccggcatgggccgcaccggcaagatgttcgcctgcgagcatgagaacgtccagccggacattctgtgtctggcgaaagcgctcggcggcggtgtgatgccgatcggcgcgacggtggcgacggaagaggtcttctcggtgctcttcgataacccgttcctgcacaccaccaccttcggcggcaacccgttggcctgtgcggcggcgctggcgacgatcaacgtgctgctgacgcaaaacctgccggcgcaggcggcgcagaaaggcgatatgctgctggacggtttccgcctgctggcgcaggagtatccggacctggtgaatgaagtgcgcgggaaaggcatgctgatggctatcgagtttgttgataacgagattggctacgactttgccagcgagatgttcagacagcgggtgctggtcgccgggacgttaaacaacgccaagacgatccgcattgaaccgccgctgacgctcacccttgagcagtgcgaacaggtgctgaaggcggcgcgcaaggcgctggcggccctgcgcgtttcggtcgaagaagcgtaataaagtgtccttcaccctctccctctgagagggtgaaggataaccctcacacctgcggtaacaggccgataaagctgcgcttctgccgcggctgcgacatcatctcctccagcttttcgacgcaggctaaatagtgcggcgtcttcttatgcgccagcaccgcctcatcgtctttataggcttcgtagataaaaaagcgggttttcacctcgggatcctgcaggacatcaaagcgcaggttgcctggttcccgcagcgcgccctcgtggttggcgcgaaacacctcgagaaactcatccacccgctcgggtttaatattaatctccaccagcgtcacgttcatttcagctctccctgtttctcttcctgccagaactgatacgcttcgcgcgcgttcagattctcatgcaccacctttttcaccgccttcagcatcgcgcgcggggcgctggactggaagatattgcgccccatatccaccccggacgccccctggtcgatcgcccgccagcacatctccagcgcctcatgctccggcagttttttaccgccggcgatgacgatcggcaccggacagctggcggtcactttttcaaagccttcctcaacgaaataggtcttcacaaactgcgcccccatttcggcggcaatccggctggccagcgagaagtagcgcgcgtcgcgggtcatctctttgccgacgccggtaaccgccagtaccggcataccgtagcgattgccggcatccaccagtttgatgatgttattgatcgactgatgttcgtattcgctgccgatatagacctgcgccgccaccgcgcaaacgttgagacgaagcgcgtcttccatcgccaccgccacgcattcgttagagagttcgctcaaaatcgaattaccgccggaggcgcgcagcaccaccggcttattggtggccgccggtacctggctgcgcagtacgccgcgggtgcacatcagcacatcggtgtcggcaaacagcggcgcaatcgacaggtcgatacgctcaagcccggtcgttggcccctggaagtagccgtgatcgaaggccagcatcaccgtgcggttgctgtgcggattaaagatgcgcgccagccgcgactgcatgccccaatccagcgagccgcagcctttcagggtatacagcgtgttctgctgcgggcggtcgataccgaagtccttaccctctttgatgtcgtctaaatcagccatctcatcctccgtcagaagtcgtagttgttgatattctctttgctgaacaccacgcgctccggcagcagcacgataccgttgcccttcgcttcatactggtagccctgcacgctattcggttcaaccttcagcgagccgatatctttcacctcaacgctatcgcctacgttaagatcgccctttttcagcaatcgatcggcgacgttaaccgcaattttgccctgcttaaccacatcccacaggccgaacgctttcaccgtgccgcgctcaacgtacgggcgcatcacgttcggagtactaaagccgacgatcgccacgccctgacgcttgaggttctccgccgcctgcgccgccgccggcagcgcattggcatccggcgcgataatggcgtcgagatccggatacgcttttaagatcccctcggcggtttgcagcgatttggtggcatcgttatagccaaactgggtggtgacgatttgccactgcggatgctctttttcgattttggctttggcttccttcacccactggttctggtcggtcaccgtcgggctggagtaaaaaaacgccactttggcggcaggtttgctgacctgcttttccgccatctccaccagcaggccaccgagctgctgcggcgtgccctggttgatatagatgctgcggcactccggtttggtatcggaatcccaggtcaggactttcaccccgcgctgcatcgcccgcttcagcgccgggcacaggccgtccggcgagacggcggagacgataatcgcgttgtagccctggttgacgaagttgttgataagctgcacctgcccggagacgctgggctcggtcgggccgtcataggtgacatcaacgcccagcgctttccccgcctctttcgcgccgttgccgccgctggtaaagaagccgacgccaaccagcttcggaataaaggcgatgcggtccgccgcctgcgcggtaaccacgctcatcgtcagcgccagcacgatcagttttaatttcattttatgctccgattgttttatgcgagaaaagacgccgccaggttgcgcgcacccattcacggtgcaggctcagcgaacgccccatcaccaccacaaccaacagcgcccctgacagcgcgctcgacacctggttggggatgccgaccatctgtaaaccctgttgcagataccccaccagcaacgctgccagcgcggtacccagtatcgatcccgagccgccgtaaatattggccccgccaagcaccgccgcggtcagcgccggcatcagcaggtcgcgacctaaatccgaacgcgccgagccgaaataggagaccatcaccagcgccgcgaccgccgaggcgacgccaaccaggccatacagcacgtacgggatgccgttcaccgacagcgcggcatagcgcgcggcgcgcgggttttgcccgagtaaaaagaggtggcggccaaagcgcccacgatgggccaatagccagaagaaaaaggtgataatcgcgaacagcaccagcggcagcggcagtccgccgagggttaaattggcgaaggcggtgaagctatcgggaaaaccgccaatcccctcgtaaccggtcgcgccggccatcccggaaagcagcagcgcgccgccgccgtacagatacagcgtgccaagcgtgatcaccagcgggttgatgccggtgtagtgaatcagcgcggcgttgaataacccgcacagcagccccaagagcaacgtcagcgataccgcgagccacagcggccagcccgcctgggtcatcaccccgagggcgatggcgcacaggccgatggtcgagcccagcgaaatatcgatcccgccgctgatgatgaccagcgtcagcggcagcgcgacgatgccgatgcagataaagtcgctggtgctaaagagcagcatattgatatccagcatgcgcggattcaaagcgccgaatagcaggatttccgcgatcagcaacgccagcagcgcgctttcccagttaagcttcagcttcatttaagccacctctttgcttttgcgttcgggaaagcgggcaacctgtttgcttcctttgttacctggctggaaacggctgtacttcagcgcccgctgatggcgggccagcgcctggcgcaggcggccatcgagcaccagcacgccgagcagcaccaggccggcgataaagtcattccaccaggcgggaaggcggaacagcaccagtacggtgtcaatttgggtgaggaaaaaggcgccgagaaacgcgccaagcaacgtgccggtaccgccgagcagcgagatcccgcccagcacgcaggcggcgatggctttcatctccaggccgctgccggtctgattaggcacaaaaccaatctgcgcggcgaagacgatcccggcgcaggccgccagcataccgttgagagtaaaggccagcatccgcgtgcggttgaccgccacgcccagctgacgcgcggcggcgaggttatcgccaacggcgtaaaaatcacgaccgaatgcggtgcgcgacaacagccagccgcctgccagcagcagcgccagcaccagccagcccagcggcgacacgccgataaacgcgggctccgagagcgatttcaggctgtcgggcaaaccctcgatccatttcccaccggtccacagcaacatcaccccgcgatacaaccccagcgtaccgagcgtcgcgacgatcgccgggatgcgcagccccaccaccagcaggccgttaaaagctccggccagcgcgccaatcgccagcgcgaaggcgatagccgtcgccagcccgtaaccgtagttcagcgccacgccgacggcgatggcgcacagcccaacggtcgaacctaccgacacgtcaatattgcgggtcagcatcaccagcgtcgcgcccaatgccagcaggcagaggatctgcgagctggcgaaaatcatcgccagggtctgcaggatgaaataggctggattgagcgccaccagcacgacaaagagcgccacgatggcaaaaaaggcgctcagttcgcgattcttcagtaacgttttcatgcctgtcctccgaaggccagggtcatcatgcgatcgacggtcaccgcctgccgcgccagctcgccgctgtagcggccctgatgcatcaccagcacccggtcggcaaggccgacgaactcatccacatcggaagagatcatcagcaccgccacgttttgcgcggcaacgctttttagcagttgatagatatcggcgcgggcggagacatccacgccgcgcgtcggctcatcgacaatcagcagtaacggattagcttccagacagcgcgccagcagcactttttgctggttgccgccagagagagtgcgcaccggctgatcgccatcggccagcttgatccccagcgcccggtgatagcgttcaaccaccgccgcctcccgtttcccctgctgccaccacgacggctgattgaacatcaccgtgttccagcgcactggcgcatcgagaaacagccccgagacctggcggtcttccggcagatagaccagcccgctggccaacctgccgcgggtgctgtcgcagctaatctcgcggttctccagccagatccgcccggcgcgcggtgtacgcaggccgtataaggtttcagcaaattcggtgcgcccggatcccaccaacccggccagaccgacgatctctccggcgcggatctccagattgagatcgataaagccttcgccggtaagatcttccacccgcagcacgggaaagtcctgcggttgcgtacggcggttgcccggtagcgacagccacagcttttgcgtgtcgctcagcgcatgatcgcggctgaccggcgtcatcgcgttaatcagttgctcatcgcggtatgccgcggtctcgccgctcagcaccaccgcgccgtcgcgcatcaccgaaatatggctggcaagctggcggatttcgggcaatttgtgtgagataaagacgatcccaacgtccagcgcctgtaacgcgcggatctggctaaacagtctctcggtttcacccggcgttaaagaggcggtgggttcatccaggatcaggatcctggcctcgcgcatcagcccgcgcaggatctcgaccatctgttgatcggctacctcgagcgtgctggcgctggcgtcgaggttgatctggcagttcaactgctgcagtttgtcctgcaaccgcgcggcggtatccgcccgcttcggcaggcggaaaagaatgttctcgcgcacgctgaggttgggaaacagcatcggctcctgcggcaccaaatagatgcctaactgatgagccagcgccggattgaggcgcgcaaacgcgcgttcgccgatcgtcagttcaccgctatccggcgtttcgacgccggcgatgatcttcatcagcgtcgatttacccgcgccgttgccgcccatcagcgcatgcacctggcccgcgcctagcgtgaaatcaatgcccttgagcaccgcaacgccggagaactgtttgcaaatctggcgagcttcaagcagtggcttcatcatcgcgcctcgattgaacaaatgatttttaaatttaataatgttcaaaagcgtagacggtgaactatatttacaaccgtgcgaagatcacactttggtgctttagatcgtcaggaaaaaatgggccagcgatgaaagatccgttttgccagtcggctcacactttccgaccgcgcaatagcgaacatatgatctaaatttttataagagttcaatttatgagcgaaaaacgcattacggaagagaaccgctacgccgggctggcgttagccgaggaagagctggtggcgcgggtggcgtggtgctactaccacgacggcctgacgcaaaatgacatcggcgagcgtttggggctgccgcggctgaagatttctcgcctgctggagaaaggccgccagtccggggtgatccgcgtgcagatcaactcgcgctatgagggctgtctggcgctggaaagtgaactccagcagcgttttggcctcaagattgcccgcgtgctgccggcgctcaacaccccgccgatgaatacccggttggggatcggcgcggcgcaatcgctgatgggcattctgcagccgggacagctgctggcggtcggcttcggcgaagccaccatgagctgcctgcagcatctcagcggctttatcggctcgcagcaggtgcggctggtgaccctctccggcggcgtcggcccctatatgaccggcatcggccagcttgatgccgcctgcagcgtcagcattattccggcgccgctgcgggtctcttcggcggaggtcgccgagatcctgcgccgcgagtcgagcgtgcgcgacgtgatgctggcggcgacggcggcggacgcggcggtggttggcattggcgccatcgatcagcggcgcgacgccaccattttacgctccggctatatcagcgagggcgaacagctgatgtacgcgcgcaaaggcgcggtcggcgacattttaggttatttcctgcaggccgacggccggccggtagaaggactggagatccatcgggaactgctcggcgtaaccctggatgagctggcgcagctgccaaccatcgtcggcgtcgccgggggagaacaaaaagcgcaggcgattcatgccgctctgattggcaagcgcattaatggcctggtaacggaagagacaacagcacgcgcggtgctcgcactggcctcctgacggcctggcgccgcgcgacaacagcgaggcgcatgtcatgagttacctgttagcgttagatgccgggaccggcagcattcgggcggtcattttcgatcttaatggccgccagttggcggtaggccaggccgaatggaaacacctgagcgtcgataacgtccccggctcgatggagttcgaccttaccaccaactggcagctggcctgccagtgcattcgccaggcgctcgacgccgcccggctctctgccgccgacattcaatccgtcgcctgctgttcgatgcgcgaagggatcgtcctctatgaccgcaacggcgaggccatctgggcctgcgccaacgtcgatgcccgcgccagccgcgaagtggcggagcttaaggagatccacgactttcgttttgaatccgaggtatacgaggtctcgggacaaaccctggcgcttagcgccatgccgcgcctgctgtggctggcgcaccaccgccccgatatctaccgcaaagcggcaaccatcaccatgatcagcgactggctggcggcgaagctttccggcgagctggcggtcgacccgtcaaacgccggcaccaccggcatgctcgacctgttcagccgcgactggcgtccggcgctgctggatatggccggactgcgcgccgatatgctgtcgccggtcaaagagaccggtaccctgctgggcgccgtcaccgaagcggcggcgcagcagagcggcctgcgcgccgggacaccggtggtgatgggcggcggcgacgtccagctcggctgcctgggccttggggtggtgcgtgccgggcaaaccgcagtactaggcggcactttctggcagcaggtggtcaacctgccgcaggtgcgtaccgatccgcagatgaatattcgcgttaatcctcatgtcattcccggcatggcgcaggcggaatcgatcagcttctttaccggccttaccatgcgctggtttcgcgacgccttctgcgctgaagaaaaactgattgccgagcggctcggcgttgatgcctattcgctgctggaggagatggccagccgcgtgcccgccggttcccacggcgtgatgcctattttttccgacgccatgcactttaagcagtggtaccacgccgcgccgtcgtttattaacctctccatcgatccggagaagtgcaacaaagcgaccctgttccgcgcgctggaggagaacgcggcgattgtctccgcctgcaacctggcgcagatttcgcagttctccggcgtgacattcgagagcctggtgtttgccggcggcggctctaaaggcgcgctgtggagccaaatcctcagcgacgtcaccggcctgccggtgcgggtgccggtggtccgcgaagccactgctctgggctgcgccatcgccgccggaaccggcgccgggctgtatgacgatatggccagcaccggagagcggttagtgagctggcaccgcgagttcaccccaaatccgcagcatcgcgagctgtatcaggagatgatgagcaaatggcagacggtgtacgccgatcagcttggcctcgtcgatagcggactgacaacgtcgatgtggcaggcgccgggcctggagcgccgccagcgcgtagcgtcctccccgtcaccctaaccaccggtaccgatccgcctttccccctctccctttgggagagggccggggtgtggggcaacgcttcgccgttctttgaatcccatcacaatcaccgcactccccttttccctttttctccgcgacggctaaattagtaactcatccgaccacataacaataattttacattggaagccactatgagccgctatccgtcgcttttcgccccgcttgagctgggcttcacaacgctcaaaaaccgcgtgttgatgggctcaatgcacaccgggctggaagagctgccggacggcgcgcagcggctggcggccttttacgccgagcgcgcccgtcacggcgtggcgctgatcgtcaccggcggcatcgctccggcgccctctggcgtcaccatggccggcggcgcggtactcaacgacgccagccatctggcgcaccatcgccatattaccgacgcggtacatcaggaaggcggcaaaatcgctctgcagatcctgcacaccggccgttacagctaccagcccgcgctggtggccccctcggcgctacaggcgccgatcaaccgttttaccccccatgaactgagccacgatgagatcctgacgctgatcgatgattttgcccactgcgcccagctggcgcgcgaagcgggctatgacggcgtcgaggtgatgggctctgagggctatctgattaacgaatttctcgccgcgcgcaccaaccagcgcgacgaccaatggggcggcgattatgccaggcgcatgcgtttcgccgtagaggtggttaaggcggtgcgccagcgcgccggccacgatttcattatcatttaccgtctgtcgatgctcgatctggtcaacgacggcagcacgctggcggaagtcactgaactggccaaagcgattgaagcggcgggagcgaccatcatcaacaccgggattggctggcacgaagcgcgcattccgaccatcgccacgccggtaccgcgcggagctttcagctgggtcacccgcaagctgaagggcgcggtgtcgatcccgttgatcaccaccaaccgcattaacgatccgcaggtcgcggaggatattctcgcccgcggcgatgccgatatggtatcgatggcccgcccgttccttgccgacgccgaatttatatcaaaagcgcaggacgatcgcgccgatcagatcaacacctgcataggctgcaatcaggcgtgtctcgatcggatcttcgtcggcaaaatcacctcctgtctggtcaacccgcgcgcgtgtcatgaaaccctgatgccggtcctgcctgccaacgcgcctaaacggctggcggtggtcggcgccgggcctgccggtctggccttcaccgtaaacgctgccgcccgcggtcatcacgtcacgttgtttgatgcgctcccggagatcggcggtcagtttaatatcgccaaacagatccccggcaaagaggagtttcacgagacgctgcgttactaccgcaccatgctcgatcttcatggtgtcgatctacgcctgaacacccgcgtcacggcagacgatctgctggcgttcgatgagacgatcctcgccaccggtatcgccccgcgcctgccggcgatcgacgggatcgatcatccaaaagtgctgagctaccttgatgtcttgcgcgataaagcgccggttggcgcgaaggtggcgattatcggctgcggcggcatcggcttcgacaccgcgatgtttttaagccagtcgggcgcggccaccagccaggatatcggcgagttctgccgcgaatggggtatcgataccagcctgcaaacggcgggagggctgagtgctgaaggcccgcagctgagtaaaagcccgcgacagattgtgatgctgcagcgcaaagccagcaaaccgggcgaagggctcggcaaaaccaccggctggatccaccgcgcgacgctgctggcgcgcggggtgaaaatgatcccggcggtcagctatgaaaagatcgatgatgaagggttacatgtcactatcggcggcgagcgccaactgctggcggtcgatcaggtggtgatctgcgccggtcaggagccgcgccgcgagctggcggatccgctgcgcgcggcggggaaaacggtgcatctcatcggcggttgcgacgtggcggcggagctggatgcgcgccgggcgattgcccagggcactaaactggcgctggcgatttagccctgtcccgggggcggcgcgatgcgccttccccgggctaccacgataatcccgcacgctagcccggctaaggcgacagccgcgagccgggggaaaccgcgacaagaatcagcgctgcttacgcaccttcgttgctttcaaaatgacaaacttattgttcgtcgcaatcgtcgtgcaattaccaaacgcacgcttcagcttacggaagtaatcgaggtggcggttgccgacgacgtacagctcgccgccgtatttcaggctgcggcgggcatcgttaaacatctgccaggcgatatggtcggtaatggcgtgctgctgatggaacggcggattacacaggatcgccgtaaagcggtcgggctcaatgccggagagcgagttgttgaccatgaattcacagcgtgcgatatcgtccggcagattgcgctcgacgttcaaccggctggaagccaccgccatgtgcgactcatcggtgaacatgacccgcgcgttcgggttttgcgccagcgcctgcaggccaatcaccccgttgccgcagccgagatcggcgatctcgccttctagatcagacggtaaatgctgcaggaagaaacgcgcgccgatatccagcccgctgcgggcaaaaacgttggcgtggttatggatggtccacggcgtgccgtccagcttccagctgtaggtttgcggcgcatcggcaagctcaggagcggtgaaaacgcagtggatcaaacgcgcttttttccacgccagcgaggtggtggtggtgccgaggattttttcaaacagcgccagcgtcgagttgtgcacatcacgggctttcgccgcggcgatgatgcgggtttccggcgtaactacttcgcgcagggcgcgcagctgctgttccagcagcgccagctgttttggcaccttaatcagcaccagcgccggcgcggccggtagcgggctcaggctatcctgaaagcgcacgctctcttcatcgataccgttcatccgcaggttgtggcgggtcgccagctcggaaataaaggagtcgttgatactgaccgggttgcgctccgccagcgcgcaggcgagcgcgccaaagccgtcgttgaagatgagcgtcaggccgtcgacgtcattcacctgttgcagcagatattcatccgccgcttcccatgcctgaagcgcttcttcttcagcgttaggtgggaaccgctctaatgtgaataactcaccgtttaactctgcctggctcatcgcctctccgcctccggaatagtaaaacccgcgagtttatacgcaaatcctgtccagttgaagagagatcgctgatcatcgccgctcagcgtagatcgccctcgtcatcggctcgcagcagcgttatcgacgcgcgagcgccgggcatcagctgctgcagataacctaccagccgctctcccgcctcatgcagggccgacaacggcatcgccggcaggctttcgagaataaaccacatcgtctgcgcgccgctgtccagccgggtgcgcacgccctgtcgccagttccagcgtcggcaggttacgcctatatcatcccgccagatgacttcgcccggctccggatattccactaccggctctgccgattttagcgtatcgaatggctcatcgccgcgggcaatggccagccgcggttcgccacggtaggcggccagattttccccaccgaccgggacggcatagcgaatgctgatcgcgttgtagatatccaccaccggatcgatggccggcaggctcccctctttcagcacccgcttgcgcagcgcctgcgccgaacagggggtacgtttcgccttcgcgccgaaggcgctgaacgcttcatcccatgccgccaggtgcgcttgcgcccagggcacatcatcctgctgcaccgccaggcaggcctcggccagcgcctgctccgcgacggcgggatcggccaccggcgcgctctccaccacaatacttaatgcccgaaagcccggcgccaggcggctgaccgcagattcgattgacggcgttacgctacgcattcgataatcctgtaatgaccaatttgtttcatcatagtgaccaatgaacgtaaaagtcaatataacgaccgattcaggatctgatgtcgaccaggtaagtcgcgccgtcgccacgcggctgaaggcctaccgtaaagcgaaaaaaatgtcgctggacgagctgtcgcgccgggccagcatcagcaaaggtatgctggtcgagatggaaaaagaggccgccaatcccagcattgcgatcctctgcaaactcgccgccgcgctgggcgtctcggtggcggatattgtcaatgtgtcaagcgaacccgcgttgcatattattcccgccgagcagatccccaccctctggcaaggcccgctggggggcagcgccaggctcctcgccggcaccgccgggccgaatatgattgagctgtggcgctgggagatgcagcccggcgaagcctttgcctcgcctggccacccggcaacaaccttcgagctgctgcacgtggaagccggcgcgctgacgctgacgcttggcgagacctgccgcacggtggcggccggggaatcggcggtggcccgcaccgaaatagagcacggttaccgcaatgagggtaccgcgccgctggtctttaccatgaccgtggctgaactgccctcctgacagacataatgataagacgatgacaaaactcatttatttacagggctatcctgaatcgctgctggcgcaggtgaccacgttaatcgagcaaggccgcctcggcgaggtgctgcaaaagcgctatccgcaagggcacgacgttaacagcgataaagcgctgtatcagtacacccaggacttgaaaaaccgctttctgcgcggcgcggcgccgatcaacaaagtgatgtatgacagtaagatccacgtgctgaacaatgcgctcggcctgcataccgccatttcccgcgtgcagggcggtaagctgaaagctaaagcggaaattcgcgtggcgacggtatttcgcgacgcgccggaagcctttctgcggatgatcgtggttcatgaactggcgcatctgaaagagaaggatcacaacaaggctttttatcagctgtgctgccatatggagccgcagtaccaccagctggagttcgacacccgcctgtggctgacgcacctttcgttaaatcgttctgcgtagtgacgcactggttttgtcatgacggcatgatagagtggcggcaggttccctttaacggagttcgtcaacgtttatgatacgtttcgcagttgttggcacaaactggatcaccaagcagtttgtcgatgccgcccatgaaaccggcaaatataaacttaccgccatctactcccgcagcctcgaacaggcgcaagccttcgccaaagactatccggtcgagcatctgtttacctcgctcgatgaactggcacagagccctgacgttgacgcggtctatattgccagcccgaactcgctgcactttccgcagacccggctgttcctgagccataagaagcacgtcatttgcgaaaagccgctggcgtcgaacctgcaggaagtcgaggcggcgatagcgctggcgaaagaaaataacgtggtgctgtttgaagcctttaaaaccgccagtctgcctaactttctcctactgaaagaaacgctcgctaaagtgggcaaactacgcaaagcctttatcaactactgtcagtactcctcgcgctatcagcgctaccttgacggcgaaaaccccaacacctttaacccggcgttctctaacggttcgattatggatatcggcttctattgcctggcgtccgctgtggcgctgtggggcgagccgcaggccgttcttgccaccgccagcctgctggacagcggcgtagacgcccagggcaccgtggtgctgagctatggcgacttcgacgtgacgctgcatcactccaaagttagcgattccgcgatccccagtgaaattcagggcgaagacggcgcgttagtgatcgaaaaaatctccgaatgtcagaagctggcgtttgtgccgcgcggcggtaaagcccaggacctgacgcagccccagcacattaataccatgctgtatgaggcggagacctttgcgcggctggtggagacacaggatgtggatcacccgggcctggcggtgagccggatcaccgccaaactgtccagcgaaattcgtcgccagaccggggtgatcttcccggccgatacgcagccgctggcgtaaaagagtgtaaaggcccgaccggccgccattgacgaaaaccgccctgtgacatattttgttacgtgcaaaggggagtaacttccttgccggttgatcgtcattacgatgcgtgcaataccgcatccggtcgccgggcaataaccaaagcccatcgcgatgtactttggttgttgtaagtgagaccttgccggaaggcgaggtctatgcataaaagcgcagcggctgccgtcttccgacgtcagccgttttgtttttatgtaaggaatatcaaatgaatactgtcggcacgccgttgctatggggtggattcgctgtcgttgtcgcgatcatgttggcaatcgacctgctgcttcagggacgacgcggttcgcatagcatgaccatgaagcaggccgctggctggtcaatcctctgggtcacgctttctctgctgttcaacgccgccttctggtggtatctggtgcaaacccagggccgggccgtcgccgatccgcaggccttagccttcctcaccggttatctgattgaaaaagcgctggcggtcgataacgtcttcgtctggttgatgctgttcagctatttcgccgtaccgcctgctctgcagcgccgggtgttggtgtatggcgtactgggcgcgatcgttctgcgtaccattatgatcttcgccggcagctggctgatttcgcagttcgactggctgctgtacgtctttggcgccttcctgctgtttaccggcgtgaagatggcgctggcgaaagaggacgactccggcatcggcgataagccgctggtgcgctggatccgcagccatctgcggatgaccgataaaatcgagagcgagcgcttcttcacccgtaaaaacggggtgctgttcgccaccccgctgctgctggtgctgattctggtggaactgagcgacgtgattttcgccgtcgacagtatcccggcaatcttcgcggtcaccaccgatccgtttatcgtgctgacctcgaacctgttcgccatcctcggcctgcgcgccatgtacttcctgctggcgggggtcgctgagcgcttctcgatgctcaaatacggtctgtcggtgatcctggtgtttattggcgtgaagatgctgatcgtcgacttctaccatatcccggttgccatctcgctgggcgtggtgggcggcatcctggccgtcacgctgctgattaacgcctgggtcaacaggcagcacgacaagcagcgcaaactgccagagtaatctactaccgcgccgtcggccctcgctggcggcgcggtaatcagctatagcagacgttctcgtaacgagaatacctgctcatgtcacaattatgttgctacgcagttaaaaaataagatccatattaaaatcacagtattttacgcttcccgccagtctttctttccgtatactcgactatgcaaacatctacttacatcctgacataaacgtaaaaaataatacgtggctgggatggcttgctacatcactggaaggaatgaattatgacaacacgcactccctcatcagggtggctctcccgcctggcgcaaggcagcctggtgaaacaaattttaatcggcctggtgcttggcgtactgttggcgctggtctctaagcctgcggctatcgccgtcggtctgctggggaccctgttcgtcggcgcgttaaaagcggtagcgccggtgctggtattgatgcttgtcatggcctcgatcgccaaccatcagcacggacaaaaaaccagtatacgccccattctgtttctctatctgctgggcacctttagcgcggcgctgaccgcggtgttgttcagttttctctttccctcgaccctgcacttaaccaccgccgccgacagcatcacgccgccgtcggggattgttgaggtgctgcgcggcctgctgatgagcatggtgtccaacccgatcgacgctctgctgaacgccaactatatcggcattctggtgtgggcggtggggcttggcttcgccctgcgtcatggtaacgacaccaccaaaaacctgatcaacgacgtctcccacgcggtgacctttatcgttaaagtggtgatccgctttgcgccgctggggatcttcggcctggtatcttccaccctggcgaccaccggtttcgagaccctgtggggctatgcccagctgctgctggtgctggtgggctgtatgctgctggtagcgctggtgattaacccgctgctggtgttctggaagatccgccgcaacccctatccgctggtgctcacctgcctgcgcgaaagcggcgtttacgcgttcttcacccgcagttccgccgccaacattccagtgaatatggcgctgtgcgagaagctgaatctggatcgcgatacctattcggtctctattccactgggggcgaccatcaatatggcaggcgcggcaatcaccatcaccgtgctgacgctggcggcggtgcatacgctgaatattccggtggatctgccgacggcgctgctgctgagcgtggtcgcttcgctgtgcgcctgcggcgcctccggcgtggcgggcggctcgctgctgctgatcccgctggcctgtaatatgtttgggatcccgaacgatgtggcgatgcaagtggttgccgttggctttattatcggcgtgctgcaggactcctgcgaaaccgcgctgaactcctccaccgacgccctgtttaccgccgcggcctgcatggcggaagacgaccagctggcgaaaaacgccctgcgcggataacgcctttgccctccgctatcgggcggaggggctctcttcctgtactgcgttttcaaccttaaacggatcgataccgcgcttttgcatccggcggaagcgaatgatattcagcccgttgacgatcaggaaactgccttctatcagcgtcccgccaatggaacccaaccacagattatgcgtgacccagcaggcggtggagcaccacatcacgcagcggacggttagccctttgcagcgaaacagcgcccaggtgctggcgacggtgccaatgatcggcagcagctccatggcatgctgcagtttacccaggccgagaatcaacgtcaggaggataaagactgtcatcacccacaggctacgggtgcgtaaggaaatgaccgtgcgaagcgcattgagcccggcgctcattccagccggcccggcgcccatcaggaaaaaatgaacgccgataatagcgctatagaccgccagctgtagcctgaaacggcgttcatcgcggttgataaaggtggtaatgccgataagaaaggcgatgacgccgaccccctgggccagccaatacgcggtcatgtaagctccctgactgaaaaaaacaaacggcgcttcactggctgaaacgccgctgttacgagcccgatggcgctacgctatcaggccgatacacaaaccaagcctctgggcgccaacgcaaatacgcctttacagggtaacaccgcttttaaagatggccagctcgcggaagtcattctgctcattacaggtcggtttaccgttggcgaaggctacaatggcatccacaaactcttccagcagctgcggcatcgttttgccgtggagcagctgcccggcatcaaagtcgatccagtgctttttcttcgccgccagctcgctgttggtggcgatcttcaccgttggcacaaagccgccgtacggcgtgccgcgaccggtgctgaacagcaccatatggcagccggcgccggccagcgcgctggtggcgaccgcgtcgttgcccggcgcgctcagtaaattcagaccatgaaccttcaggcgctcgccgtagcgcagaacatccaccacctggctggagcccgctttctgagtacagcccagcgacttatcttcgagggtagtgatccctccggctttattacccggcgaggggttttcgtaaataggctggtcgtgagcaataaagtactgcttaaagtcattgaccatggtcaccagcttgtcgaaggtcgcttcgtcgcggcagtggctcatcagcaactgttcagcgccgaacatctccggcacttcggtcagcacggtagtgccgccgttggcgatcacatagtctgagaagcggcctagcatcggattagcggtaatgcccgacaggccgtccgatcccccgcactcgaggccaaacttcagctcgctgagcttgcccggctggcgtttatcctgacgcatcacttcatacagctgatgcagatgctcaacccccgcctccacttcatcgtcctgatgctggcaaaccataaagtgcacgcgctgcgggtcaaactcgcccagcgtctcgcgaaaggcctccacctggttgttttcacagccaaggccaaccaccagcaccgccccggcgttcgggtgacgaaccatattttgcagcatggtgcgagtgttgatgtgatcgtccccaagctgcgagcagccataggtgtggctgaagagatgtaccccatcgatatcctcagcgccatacgtctctttcaggaaacggttctgcatttgtctggccatcgcgttgacgcagccgacggtcggcaggatccacagctcattgcgcacgccgacgtcaccgttggcgcgacgataaatctgtacttcgcgatccgcaggctgtggcggttgggcaaccaggtccggttgatagcgatacgcgtcaaggtcgctgagattggtgcgcgtattgtgcgcatgaacatgctcgcccggcgcgatatccgccagcgcatggccaatcggcaacccgtacttaacgacgttttcccctttcgcgatagcgcgcagtgcaaacttgtggccgcgaacgatatcctggccgagggtgaccgagtcattatcaatcgtcaccacgctaccggcagcgatatccgtcagcgcgaccgcgacgttatcctgcgaatggattttgatgtattgcatatcaaccgacctctggccttagttcagttcaatggcgaaatagtcacgcgcattgttaaagcaaatgtttttcaccatctcgcccagcagcgcgatatccgcaggcgcttcgccggcagccacccaacggccgatcatctggcacagaatgcggcggaagtattcgtggcgcgtgtaggagaggaagctgcgactgtcggtcaacatcccgacgaagcggctcagcagcccgagctgcgccagctgggtcatctgccgctccataccgtctttctgatcgttgaaccaccagccggagccgaactgcatcttgcctggcatgccttcaccctggaagttaccgatcatggtgcccagcacttcgttatcacgcgggttcaggcagtagagaatcgttttcggcagcaggttttcttcgttctgcttgctcagcagcttagacagctcttccgccatcggacgatcgttgatcgagtcgaagccgacgtctggccctaacagtttgaactgacggaggttgttgttacgcagcgcgccaatgtggtactgctggacccagccgcgacgggcatactctgcgccgaggaataccagcaccgcggttttgaactgcgccacttcgtgttcgctaagggtctcgccagccaggcggcgcgccagaatgtcatccagctcggcgtcggtcgcttcggcaaacagcaccacgtccagcgcatgatcggagactttgcagccgtgtgcggcaaaatgatccagacgtttggtcagggcgctttgcaggtcagcgaagcggcgaatatcggtatcggatacctcgcccagcttagccatataatcattgaaggtcgccaactcgatgttgaaggctttatccgggcgccagctcggcagcactttgatgtcaaaggagttgtctttggcgacagccgcgtggtgctcaagagaatcaatcggatcgtcggtggtaccgaccatcttcacattcatctgcttcatgattccgcgggcggagaaggcatcctgagccagcaaatcattacactggtcccagatctcatcggcggtggatggcgacaacagcttacctgtaataccaaaaggtcgacgcagctctaaatgggtccagtggtataacgggttgccaatagtgtgcggaaccgtggccgcccaggcgtcaaatttctcgcgatcggacgcatcaccggtacacagacgctccggcacgccgttagtgcgcattgcgcgccatttatagtgatcgcctttcagccagatgtcatacaggtttttaaagcgatagttttcggcaacctgctgcggcggaaggtggcagtggtagtcgaaaatcggctgatctttggcgtaatcatggtatagacggcgggcaaactcggtatcaagtagaaaatcttcagtcataaacgatgtcattcgcgtgtcctcttcgctccagtgcgggagcctttcagatgattgactacaatgctgacaaagttatcacaccaatttctacagaccgaactgtttttcgtgagttagatcaataaacgtcgataaaaaaatgaccgccctggagcaaaacacctcgccagagcgcgccatctctggctttccaggcaagggataaagaccacactaactttcccacttttgtgacagctctcaacttttaaagttgtatgacaagttatctttctgccgtcgcaacatataaaccgacggaatgcattaccggtgcttatggcatcggcttatacggaatggataccgactttcaacataacaactgatggtaaggttcaggccagaggggactaccctcctgaatcctccgtttcgctttcccggccgcttattgcgctcggtaaaggccgcacctgatgcggaaagataacagacgatgaggtttacatgcgtaaaattaaagggttacgttggtacatgatcgcgctggtgacgctgggcaccgtgctgggctacctgacccgtaacaccgtagcggcggccgcgccgacgctgatggaagagttacacatttcgacccaacagtactcctatatcattgcagcctattccgctgcctataccgttatgcagcccgtcgcggggtatgtccttgatattctggggaccaaaattggctatgccttcttcgccatcgcctgggcggtattctgcggctcaacggcgctggccggcagctggggtggactggcgctggcccgtggcgcagtcggcgcagcggaggccgcaatgatccccgccggcctgaaggccagctcagagtggttcccggcaaaagagcgctctatcgcggtgggctacttcaacgtgggttcctctattggcgccatgatcgcgccgccgttggtggtatgggcgattgtcatgcacagctggcagatggcgttcatcatctccggggtattgagcttcgcctgggccatcgcctggcttatcttctacaaacacccgcgcgaccagaaaaaattatctgacgaagaacgtgactacatcattggcggtcaggagtctcagcatcagaccaataacgcgaagaaaatgtcgccgtggcaaatcctgcgcaaccgtcagttctggggtatcgccctgccgcgcttcctcgccgagccggcctgggggacctttaacgcctggatcccgctgttcatgttcaaagtttacggttttaacctgaaagagatcgccatgttcgcctggatgccgatgctgttcgccgacctcggctgcatcgtcggcggatatctgccgccgctgttccagcgctggtttggcgtcaacctgatcgtgtcgcgtaaaatggtggtcaccatgggcgccctgctgatgattggcccggggatgatcggcctgttcaccagcccgtacgtggcgattgccctgctgtgcatcggcgggttcgctcaccaggcgctgtccggggcgctgattaccctctcttccgacgtctttggccgtaacgaagtcgctaccgccaacggtctgaccgggatggccgcctggctggcgagcaccatgttcgccctggtcgtcggcgcgctggcggataccatcggctttagcccgctgtttgcggtactggccgtctttgacctgctgggcgcgctggttatctggacggtgctgaaaaacaaaccggctgacgatgactcgacgccgcttagcagccgcaaaccggtcacgcagagttagatcgaatggcaaggtaatcgccgatcaagccgccttctcaggcggctttttcatgcctgccagtggtggaaagcgcgtaaaagtggtataacaaatcgaatattgtcgccatcttccgggagcgaatatggaaatcattgaaccacgccgtctatatcagcagcttgccgctgagctgaagacgcgcatcgaacaaggtgtctaccttgtaggggataagctgcccgccgagcgcttcatcgccgatgaaaaaaacgtcagccgcaccgtggttcgtgaagccattatcatgctggaagtggaagggtatgtcgaagtccgcaaagggtcgggtatccacgttatctccaaccatccgaaataccagcaggtggccgatgaaagccttgagttcgccaactatggcccctttgaactgctgcaggcgcggcagctaattgaaagcaatattgccgaattcgcggcgactcaggtgaccaaacaggacatcatgaagctgatggaaattcaggagaaagcgcgtaacgagaaatgtttccgcgactccgagtgggacctgcagtttcacgtccaggtggcgctggcgacgcagaacagcgcgctggcggcgatcgtggaaaagatgtggacccagcgcgtgcataacccctactggaaaaagctgcatgagcatatcgacctgcgtacggtcgataactggtgcgacgaccacgatcagatcctgaaagctctgctgcgaaaagatcccaacgccgccaagctggcgatgtggcagcatctggaaaataccaagcaaatgttgttcaacgaaaccagcgatgactttgaatttaatgccgatcgctacttatttgccgaaaacccagtcgttcatctcgataccgcagtcaacggcgcgaaataaggccttatccctccggcgcgcccccctgcgcgcctgtctgacagtgaggctggagtaagcaagtcatatatagtgtcagcctgtgtaaatcctctcgcctcccatctccgcaatcagcaaaatcaacgagcaacacgttgcaatttctctgacggaaagtcaggtgatttgttacaattagatgcattttgtcgttctgggggtaggtatttacttacttcagtcttatacagggaagcgttcagagcgcctaagcagcgaccataatctcataaaaatcttgtcgccctatatgccacgcgctcagacgtgccgttaaccgatgtaccaggaatcgtgaatggaactatttacccagttattgaatgccttgtgggctcaggattacgaaacgctcgcgaatccctccatgataggcatgctgtattttgtcttgtttatgattttgttccttgagaacgggttattgcctgccgcgtttttaccgggggatagtctgctcgtgctcgtgggcgtgctgatcgccaaaggggcgatgggttttccggaaaccttgctgctgctcaccgccgccgccagcctcggctgctggctaagctatattcaggggcgttggctgggtaatacgcggatcgtgcaaaactggctgtcacacttgccttcgcactatcaccagcgtgcgcatcacttgtttcataagcatgggctctccgcgctgctgatcggccgctttatcgccttcgtacgcacgctgctgcccaccatcgccgggctttccggccttaataacgcccgttttcagtttttcaactggatgagcggcctgctgtgggtgctcatcctgacctcgcttggctatctgctgggtaaaaccccggtattcctcaagtatgaagatcagctgatgtcctgcctgatgctcctgccggttgccctgttggtcttcggactgatcggctcgctggtggtactgtggaagaaaaaatacagaagccggggctaatgatggtcatgaaacgcccttccctgcgccagttcagctggctgctgggtggttctcttctgctcggcgccctgttctggctttggctggcggtgcagcagcaggaggccacgctggcgatacgcccggttggccagggtatcggaatgccggacggtttctccgtctggcatcatctcgatgccaacggcatccgctttaaaagcatcacgccgcagaaggatggtctgctgattaagttcgattccaccgcccagggcgcggcggcgaaagaagttctcggccgcgctctgccacatggttatattattgcccttctggaggacgataactcgcccaccgcctggctatcccgcctgcgcgacgcgccgcatcgcctcgggtaagctgccgccagactgcgtttttaacccagtctggtggtttcccgcatttgttactatgcttaaacctgcgggaatcaacgcattcacgttcaccaacgggaacgggtatatcctccgggtatcccctcagacaatggaaggtactatccatgaaacaccgcatcgctctgcttctggtcctgacttcacttagcgccagcgccctagccgcctctccctgccaggaaaaagagcaggatattcaacgagagatcagctacgccgaaaagcatcataatcaaagtcgcattgatgggctaaataccgcgctacgtcaggttcgggaaaactgtagcgacagtaaacttaaagccgatcatcagcaaaaaattgccaaacagcgggaagagatcgctgaacgtcagcgcgatctgcaggaagcccggaagaaaggcgatgcggacaaaattaacaaacgccagcataaactcaatgaagcgcaacaggagttaaaaacgctggagtctcgggattactaatcaccattaactttcgcaacacggaccacgctacaggagaacgacatggctaaagagaatgtgactgacgaccttcgtgcagaactgaaaacgctggcggataccctggaggaagtactaaattcctcggcggacaagtcgaaagaagagatgggtaaactgcgcagtaaagccgagagcgcgctgaaagagagccgcgctcgtttgggtgaaaccagcgaagcgattcttcgtcaaactcgtgagaccgccgcgcgagcggatgattatgttcgcgaaaatccgtggactggggtaggaattggcgccgccgtcgggctggtgctgggtgtcctgctgtcgcgtcgctgattatggcgaatactcaacacacgcagggaccgggtcagcgcgttttctccattggtcagcgcatcgtcacgctgctggtcgaaatggtggaaacgcggctgcgtctggtcgtcgtggagctggaggaggagaaagccaacctcttccagctgctgatcatgaccggactgacgctgctgtttgccgcgtttggcctcatgagtctgctggtgctggttatctgggccgttgacgctcagtaccgcctgcacgtgatgatcgccaccaccgttgtgctgctccttgccgccgcgatcgtgggtatcctaaccctacgtaaggcgcgccgatccacgctgctgcgtctaacgcgtaaagagctggagaacgaccgtgcccttctggaggaggataaatcgtgaatggccgacaggagcgtgaacggcacaaggcgcagctgctgcgccagatccagcagcaacggctggagctcagcgcctgccgccgtcactggcacgaggcgactgcgcccctcgaccgcggctggcatacgctgctgagtttacgttcgtggctgatggttggcagcggtctgatggccgtatggtccgtacgacatccgcattttttaatgcgctggaccaaacgcggactcggactgtggagcacctggcgcctggtgcgcgggatcctgcgccagtcggcagttcgctagcggccctgagcgtgggcgctttccctggcgcccacgctctgccatttccctgtccgttaccgcaccctgttcgcagcaacatgcgccttttccgtagtgcgcccttctctacgacgccctttacctcacgccataccaggaccggtggtggcccatcgcattcggtacgctttcgcctccgcgtactgattactcagaaactttgaaatagatctacagttttccttgctaacaattccctctccgcctcgctactatcctctccatcgacagcaacaccgcgtaactacgcgggattgcactaaaaaacaaaaccgccgccctttgggttttctggagtaaaaaatgaaaaaattagaagatgttggtgtattggtagcgcgtattctgatgccgattctgtttatcactgcaggatggggcaaaatcaccggttatgcgggaacccagcagtatatggaagccatgggcgtcccgggcgcgctgctgccgctgaccatcctccttgagttcggcggcggtctggcgattctgttcggtttcctgacccggaccaccgcgctgttcactgcgggctttacgctgctgaccgcgttcctgttccatagcaactttgcggaaggcgtgaactccctgatgttcatgaagaacctgaccattgcgggcggttacctgctgctggccattaccggaccgggcgccttcagtattgaccgtgtactgaataagaaatggtaagcgcactatactgaatgaatgaaaaaagcgaggagaccactcctcgcttttgctatctgtagtctgaaggaggagcaaagatgggacaattagttgacggcgtctggcaggatacctggtatgacacaaaatccaccggtgggcgttttaaacgttccgtttccgccttccgtaactggctgaccgccgacggcgcggctggccccagcggtgaaggcggttttgccgcggaaaaggatcgctatcatttgtatgtttctctcgcctgcccgtgggcgcatcgcacgttaattatgcgtaaattaaaaggtctggaaccttttctccccgtatccgtggtcaatccgctgatgctggaaaacggctggacctttgacgatagcttcccggaagccaccggcgataccctctaccagcatgactttctctatcagctgtatctgcacgccgacccgcactacaccggacgcgtgaccgtgccggtgctgtgggataaaaaacagcagaccatcgtcagcaatgagtcggcagaaatcatccgcatgttcaataccgccttcgatggccttggcgcccgggccggggattactacccgccagcgctgcgggaacaaatcgatgagctgaacggctggatctatgacaacgtcaacaacggcgtgtataaagccggctttgccaccagccagcaagcttacgacgaagcggtggatgcggtctttacctcgctggagcggctggagcagatcctcggccagcatcgctatctgacgggcaatcagctaacggaagccgacattcgcctgtggacaacgctggtacgcttcgacccggtatatgtaacccattttaaatgcgataaacggcgcatcagcgattacctcaatctgtacggtttcctgcgcgacatctaccagatgccgggtatcgccgagacggtaagttttccgcatatccgtcaccactattaccgcagccataaaaccattaaccctaccggtattatttccattgggccgcagcaggatctcaacgaaccgcacggtcgcgatcagcgcttccgttgatctgtcgggcgccagtgatggcgcccaataattcagaaaacagatatttacccaccattcattcacgtctattcttattgcgatcgcttaaaaaacaagtgattgacggttaattgaggcgtagaaatggactggtatctcaaggtattaaaaaactatataggatttggcggccgtgcgcggcgcaaagagtactggatgtttattctggtcaacctcatcctgaccggcgtattgagcatcatcgataaaatgctgggctggcagcgggctggcggcgaaggcattctgaccactatctatggcgtactggtctttttaccgtggtgggcggtgcaatttcgccgtctgcatgacaccgatcgttcggcctggtggctattgctgctgttgatcccggtcatcggctggctggtgatcctgatctttaactgccagcgcggcaccgaaggcaataatcgcttcgggcccgatccgaaacccttttcctactaatcttcctgctcctcccgctagcgggaggagcgtcttcatcactatctgccggcaaacagcttggggatctcacgcagacaccaggacttcgcttcgcccatactgtcccgtcgccaggccatgataatgtcaatttcattggtgtattccgggctgacgacccgcaggcgaccttcggcaatatccttctccaccagcggatagggcatagtcgccacgcccagtccggccagtagcgcctgacgtttatcttctatcgtactcaccgttaaacgcggctgtttatccagcagttgaacggtgaggacgggccgctcgcgcgcggtatccgccaccgcgacgccgcggtatttcacgcgggtaacctcagagagcggctccggctcctgatggatcgggtgatccggcgccgcgacgtacacgctgagcaccgaatagagtttgcgcgagttaatctccgaagaggaacgaaaatgcatatccggtgcgacaacgatatccgcccgcccctgctccagccgctcccaggcgccggccagcacctcagtgataatcgacagctgggtgtttgatttagtcgccagtttctcaatcagcggaaacagatccggagtgggcaccagcgcttcggtaacgatcgtcaggtgggtttcccaaccacgcgacagggcttcagcatcggtggtgagtttatccgccgcttcaagcagcacgcgcccgcgctccagcagcattcttccaacgttagtgaacttcgtgcgatgacctgagcggtcaaacagcaccacgtccagttcctcctccagtttttgcatggtgtagctcagggcggaaggcacgcgtcccagctcatcagccgcggcagcgaagcttccgcgccggtcgatcgcatccatcacgcgtaacgcttccagcgttaatgctctctctttggccatcgctttctcattcaggaaatttgaacataccgggcagaatatctggctaacaatacagcgtccatacctttaccattgatttagtgtaaagagaggtcaagaacatgattactacccgaacagccaaacaatgcggacaagcagacttcggctggctgcaggcccgctacaccttctcctttggccactacttcgacccgaaattactgggcttcgcatccttgcgcgtcctcaaccaggaagtgctggcgcccggcgcttccttccaggccagaacgtacccaaaagtcgatatcctgaacctgattctggaaggcgaagcggagtatcgcgacagcgacggcaaccacgtgcaggccaaagccggtgaagcgctgctgatcgccacccagcctggcgtgagctatagcgagcataatctgagtaaagagcagtcgttaacgcgaatgcaactttggcttgatgcctgcccgcagcgggaaaacccgctgcagcagaaaatcaatgtcgcagacgcgacgctgcagctgctggcctctccggagggcggggataacagcctccagcttcgccaacaggcctgggtctaccatatcgcgctggagaaaggtgagcagatcaacgtgcaattacatggtccacgcgcctacctgcagtcgattcacggctccgtccatgccgtcgcacaggaacagcaaaagcaggctctcacctgcggtgacggcgcatttattcgtgacgaagctaacattaccctcgtcgccgatacgccgctgcgcgctttgctgatagatttaccggtgtaacaacggaagtgatggagtctgtcagtgagtaagaagaaaaacagaaaaaaggcgtcaccaacgccgttagccccggtgcaaccgcaagtcgccggggccgccagctttggttatgatgagatgcttagcgaactggaagccattgttgccgaagcggagatccgcctgcgggatgaagaaagtctcgcctgaaacggcaaaatggctgggttgattttcattaatggcctgaagaagatatcggccccgcgaggggccgatggcattattcactcagcgcgtcggcaagatcttttttcacctgcgtgcgctgctccggcgtcagtaccttattcacctcaaaatagtacttcacgcggtaataacgcacctgctgatcaatcttgctgaaggccgccagctgatcgttgaccgctttttcatcccatttaccggaatcaatcacgtttatcagagccccgtctttaatttcctgttgggaaatctgctggacattactctccaactgctgatgcaggcttttaattttcgcgacctgatcgttggtaagttttaagtgctgaacaataggatcctgcgccggtgctggcgccgccttaacgtctgcggcctgagccgtgatagagaaaccggtggtcaacagcgtggcaaaggcaatacgggttatcaatttcattttttttcctgaagtaaaggtggcagaaatagcggattattattttacagggcgcagtgaataaatgtaaaaaatgatagccaaacattatatatccacagcagaaatatacttcactaaaacatataaaatatgaatgctgtgttaatttatatatttgacgccctaacatcaccagtttttattttaatttcaacagcaggcaaaatatttgacagcggtgacttttcctttaatttaattagcgcatattacgttatccagcgcatcaaggatatcatttaaaaatagataaggagattgagatgttattacgttttcgcgtattaccgctggtttttgtcatctcgctgttaagcggctgcggcctggcttctaaagccttttattccgcgggagacaaattatttcaacccggagatgacgccgtcgcttcgatgcagacgtattcagtggctcagttcctgcagccgtttactctcaacccggcgaaggccagcagcgattatctgggtaaatgggtcaaggtacgcggggtgattgtcgacattcgtcggaagagcggtatcgccggcagctactattttatcgtgaccatgcgagatgaacagaataaaacggataaacgtcttacctttaattttggctcgcataacagcgcagacgtagaggctttaagcaacggcagcgtcgctacgatcgtcggccaggttcatcaggtgcaagattccacgatcccgacgctacagaatcccaaggtggttaaataacggtagctgaccgataagccgcgttcttttggtatagcgtcgtggatagtcattcatccgcgtcacgggttcagatagcaaaaaccccgccggagcggggttttgacataaaaaaggtgaaactgaccgataagccgcgttcttttggtatagcgtcgtggacagtcattcatcctgtccccgctattcgaatagcaaaaaccccgccgaagcggggcttttgcgtaaaaggtgaaactgaccgataagccgggttctgtcgtggacagtcattcatctaggccagcaatcgctcactggctcaagcagcctacccgggttcagtacgggccgtaccttatgaacccctatttggccttgctccgggtggagtttaccgtgccgcggactgttaccagccgcgcggtgcgctcttaccgcaccctttcacccttacctgatcccgcttgcgcgggccatcggcggtttgctctctgttgcactggtcgtgggctgtgacaccccccaggcgttacctggcaccttgccctatggagcccggactttcctcccctccgcccgtctccccccgaaggaggacgacgacgaagcggcgactgtctggtcagcttcggcgcgcagtatagagggtttaccgcccgttgtcatccctcagtggtcatcccaacctgcagggtggcagcaatattacgcgacgcgcggtaaatattatcaaacgccccgcgaaatgcctcttccagcgtcgaaacggaagttaacacgctgaatacggcatcgataccgtgctggtgaaccacgccgacatcgtgagccaggctgccagcaataccgatcaccggcttacggtatttcttcgccacccgagccacccccaccggcaccttaccgtgaacagactggctatcgagccgcccttccccggtgaccaccagtgagcagtcatggatttgttcttccagcttcagcgcctcggtaacgatctcaatcccgctgcgcagctccgcattgagaaaggccatcagcgccgcgcccatgccgccggccgctcccgcgccggggatcgacttcacgtccacctgcagcgacgtcttaatgacgtcggcataatgcgccagattacgatccagctcgacgatcatcgcctcggtcgcccctttctgtgggccaaagatccgcgacgccccacgctcgcccaccagcggattggtaacatcgcaggccacgtgaatcatcctgtcacgtaagcgcggatcgatggcggaaagatcgatccggctcagacggctcaaactgcccccgccatggccgatctcttgtccctcggcgtcacagaggcgggcgcctagcgcctgcatcatacccgccccaccgtcgttggtcgcactaccgccgatgccgataatgatccgttccgcaccatgctccagcgcctgtaatattagctccccggtaccccgtgaagtggtgatgagcgggttacgtttgtcgggcggaacgagccccagaccgctggctgccgccatctcaataaacgcggtgacgccgtcgccggacatgccccagcaggccttcactctctcacccagcggacccgttacccacgcgaaatgttcctttccctgcgtggcggcaatcatggcttccaccgtcccctcgccgccgtcggcgacgggcagggaaacatactgtgcatcagggaaaatttcccgaaatcctttttctatcgcctgagctacctcgctggcagaaaggctttctttgtaagagtctggggcaatgacgattttcataattttgtagcctgacagcgccgcgcaaggcaagcataacagggcgcgcagggcgcccttcttgttagcgagtgacttccactttcgccagtttttcgtaatagcacgccagcgcgctatggtctgcagtaccgagaccgtccgcgcgcagcgcctgcatcatctccatcaccgccgccgtcagcggcagttgggcgcccacgccgtgtgaggtatccaacgcattggccagatctttaatatgcaggtcgatacggaaacccggtttgaagttacggtccatcaccatcggggctttcgcatccagcacggtactgcccgccagaccgccgcgaatagcctgataaaccagatccggattgacgccggctttagtcgccagggtcagcgcttcagacatcgccgcgatgttcagcgcgacaattacctggttagccagtttggtgacgttgcccgcgccaatatcgccggtatgcactacggagccggccatcgctttcatcagatcgtagtatttatcgaagatcgctttatcgccgccgaccatgaccgacagcgtgccgtcgatggctttcggttcgccgccgctcaccggcgcatccagcatatcaatacctttggctttcagcgcttcgctgatttcccgactcgccagcggcgcaatggagctcatatcgatcaccacggtgcccggtttcgccccttcaataatgccgttttcacccagcgccacctctttaacatgcggagagttcggcagcatggtgatgatcacctcgcactgttcggcaatcgctttcggcgtcgtcgcggtctcagcgccagcggcgatcacgtcggcaatcgcttccgggttacggtcagacaccaccagcgagtaacccgctttcagcaaatttttgctcatcggtttgcccataatgccaagaccgataaaacctactttgattgtcataatgttctctctcttcatcctggtgattattttttaaacgcgtcggcaagtttctgggttgcagaacggaagacgcccagatcgctgccaacggcgacgaaggtcgcgccccattccagatagcggcgcgcatcggcttccactggcgccagaatgccgcttggcttaccgtgcttcttcgcgctggcgaagatatgttggatagcgcgctgcacctcaggatgggaggcattgcccaaatggcctaaggcggcggccaggtcgctcgggccgacaaacacaccgtccacgccctcggtcgcggcaatcgcctcgacgttgtccactccggtctggctctcaatctgcaccagaatggaaatgttcttgttggactgggcgaagtagtccggcacggtgccaaacatattgccgcggtgggaaacggagaccccgcggatcccttccggcggataacgggtcgaagccaccgcctgcgccgcctgttcagccgtctcgacaaacggcaccaggaagttatagaagccgatgtccagcatgcgcttgatgatgatgggttcattggtcggcacacggactacctgcgcgctggagctacctttcagggccatcagctgcggaatgagcgtggtgacgtcgtttggcgcgtgttccgcgtccagcaccagccagtcgaaccccgccagacccagcacctcggtgctaatcgggttagccaaagcgcaccagcagccaatctgcacctgatgcgccgccagcgcggccttaaatttgttcggaaaaattgcgttatccatgatttttaccttgcgttaatcgttgcttacttctgcaattccatacgtttgatatcgccaaccacaaacaggtagcagaccatcatcatcagcgcggagccgccaacaaaaatcagtgcgccattaaatgagtgcagttcgctcacgatatagccaataaccagcggcgtggcgatcgaggccacattgccaaagacgttgaataccccgccgcacaggcccacaatctccttcggcgcgacatccgagataaccggccagcccagcgcgccaaagcctttgccaaagaacgccagcgccataagcgtaatgaccagcggcgtgctggccgtgtagttacacaggatgatggacgacgccagcagcattcccagcacaatgggcagcttacgcgcaaaagtcagcgtgcagccgcggccaatcagataatccgaaaacagcccgcccagtacgccgccagcaaagccaaacagcgccggaatcgaagccacaaaccccactttcagaatcgacattcccttgtcctgcacgaggtagatcggaaaccacgtcaggaagaaccatgtaatggtattcaggaaatactgaccgaaaaatacgcctaacatcattcggttagtcagcaactggcggatatagtccatcttcggcccggccgccggggtggcctcttttttatggtccatatcgaccactgcgccgccttctgagatatatttcagctccgcggcggacattcgcggatgatcggtggggttatgcacaaacttcacccagatgatggtgagcacaaaccctattatccccatcacggtaaagacatgttcccagcccagcgcgaaggtcagccagccgagcagcggcgagaacagagccagcgagaagtactgagcggcattaaagatagctgaagccgtaccccgctctttggccggaaaccaggccgccacaatgcgggcgttggcgggaaacgagggcgcttcggaaaagcccagcataaaacgcataaagaacatggagaccccggcccaggcgagcgggaacacatcaataaagccttgcaggaaggtaaacagtgaccagaaaaacagactgtatgaataaacctttttcgagccaaatttatccagcagccagccgccagggatctgcatcagcaaataagcccagccgaaggcggaaaaaatgtatcccatcgacaccgcgctgagccccagctctttcgcgacttcagtaccggcgatagacaaggtcgcgcggtcgccatagttcactgccgtcaccacaaatatcatcaacagaattaaatagcgggtcggtattccttttttttcatctaatgtagaatccaaaatcatttagacattcctcgggcacagaacaccttttataattgttttaagtggtttctgatttatttaaaagacgatattgaaattgtctattcgcatatcgatcacctcaaaaacatgactcagtataatcagcacgcccccgccagacactatgcatacccacaatataaagttattatttaaatccataattgtgcttatgccataagtcatgggcgctaatccacacttcttacgattgcctgccctgcagaggttagcgtcataaaaaggagtgatgccgatcacattttaaaatcaactcagctgacatcctttattccatcatactgatacgtagcaaatgaattagcgttttattttattattagcacctgtttggagatgactggacaatggctgacattgcaattcgacaacaatcgccgaccgcgttttatattaaagttgacccgacagataatgtggcgattattgtcaacgatcgcggcttaaccgccggaacgcgtttcccggacggcctgacgctcgtcgagcatatcccgcagggtcacaaagttgccctggtggatatccccgcccatggtgaaatcatccgctacggcgaagtcattggctatgccgtacgcgatatcccgcagggaagctggattgacgagtcgctggtggagctgcccaccgccccgccgctgaataccctgccgctggccactaaagtgcctgaaccgctaccgccgctggaaggttacaccttcgaaggctaccgcaatgctgacggcagcgtgggtaccaagaatctgctgggtattaccaccagcgtgcactgcgtcgctggcgtggtcgattacgtggttaaaatcattgaacgcgacctgctgccaaactatcccaacgtcgatggcgtggtgggcctgaatcatctctacggctgcggcgtggcgattaatgcgccggcggcggtagtgccgattcgcaccattcataatatcgccctcaacccaaacttcggcggcgaggtgatggtcattggcctcggctgtgagaagctgcagccggaacgcctgctgcagggcacggaagacgtcaaaagtatcccggtggacagcgccagcatcgtcagcctgcaggatgaaaagcatgttggttttaaatcgatggtcgatgacattctgcaggtcgccgagcgccacctggcgaaactgaaccagcgccagcgggaaacctgcccggcctctgagctggtggtcgggatgcagtgcggcggcagcgacgccttttcaggcgtgaccgccaacccggcggtaggttacgcgtccgacctgctggtgcgctgcggcgcgacggtgatgttctcagaagtgaccgaagtacgcgacgccattcatctgttgacgccgcgggcgattaacgaagaggtcggtaaacgtctgctggaagagatggcctggtacgataactatcttgatatgggcaaaaccgaccgcagcgccaacccctcccccggcaacaagaaaggcggtctggccaacgtggtggaaaaagcgctggggtcgattgccaaatcagggaaaagcgccatcgttgaggtgctctctccggggcagcgtccgaccaaacgcggcctcatttacgccgcaacccccgccagcgattttgtctgcggcacccagcaggtagcctctggcatcacggtgcaggtattcaccaccggtcgcggtacgccgtacggactgatggcggtaccggtgataaaaatggcgacccgtaccgagctggccaaccgctggtatgacttaatggacattaacgccgggaccatcgccactggcgaagagacgattgaggatgtcgggcggaagctgttcgaatttattctcgacgtcgccagcggacgcaaaaaaaccttctccgatcaatggggcctgcacaaccagctggcggtatttaacccggcgccggtaacctgatcgagagcgtaaggatttaaccacttttagcccggatctatccgggcttgttggttagggatgctgggcggcaagaaaagcgctgatctccgcctgcgtcgaggtgccttccatggggccgcgttggctaatcgccagcgagccgctggcgtttgcccatctcagcgcctcccggggcgtggcgccattgaggaacagactaacaaaagtggcgccaaagcaatccccggcaccagtcggatccaccaccggcacgctgaagccggcgacatggtgcgtctcgttggcgctaaagtagcttgcgccacgcggcccgcgtttaatcaccacatgcttcacgccgcgtttcagtagcttatcaaccaggacctgctcattgcgttccggattgagaccaaagtaatccagctcgccatcgctcggcaggaagatatcggtgtagtcgaggatatattcaaaggcctgcgacatctccgggatgttcagcatctctttgcgaatatttgggtcgaacgatactgtgccgctgcggcctttaatgttttcaatcgctttacgcatcgcatcgataatacggaacgagaatagcgatgaccccataatatgaaaatgctgacactgatttagcaacgcttcgtcaatgtggtcggcagtcagcagaccgcaggcgctgttaggcatattaaaaataaaatcgcgctgcgcctggctacgatagctgacgaaggcgctaccggtagtcgctttctgcagcatagcgatgccgttgacgttgacgccgtctttctccagccgcgcaatattcatctcgccaaatgcgtcgttgcccacacagctaaacaacacggagccgaaacccagctttgccacctgatcggcaaatattgccggcgccccgctgggatagggcccccaaaattcaccgggacgggaaaacccctgattctcttccttggcgagaaactccaccagcagctcgccgatggtgcaaatggttacgttcatcaccgctcctggtttgtcttatgcaaagccgtgttgagccatgtcaggcattcattgttggtatagctgttggtcaaacccgcggcgaggaagcaggcatggtactctgccgcgacgacctgaggggtcacgacgctgctgatctgctgtaattcacccacagcataacgtttctcgccatagaccggccgggaagcgacaatcgcaatgactcgtttactctgggccaccgcttcgcttaacaaatgtgccgtaacctcgttacgcacgcttagcgtgccgtcttcagcaatgtggtccaccgctatcagcgcacgtgaagggcggtaatgacccaacgccttcagcgccagttcgccctccacaatccgcccctgaccggacaacaccccgccaagcagaacggtttccccatttaaaaactcctgcgccagcgcgacgtggcccagatcatttaatagcaggcaaagctcttctctgttggccagaaaggggatcactttacgcaaaatggaaccctggcctagaaacagcgtttcgccattttctatctgcgccgccacctggcgagccatttccgtctccagcgctttatctctgacggcaggcgcttctcgggtcatcgcaaccggcgcgccagcctgggcggtataaatcgccccgccaaaagagcgtttcaagtagccctgctgctcgaggtagttgagatcgttacggattgtcaccccggaaacagccagcatttctgccagatcgtcgactttgatctcgccgttcttacgaacgatctctgcgatgtccaagcgccttttcagcaagctggttgacggttttgccacggtttatgccttattattttctcctggaataactttcatttttaaatttccctcttgcaatgtcaaaccgcggctgtagccctatcccgccatcaatcagcaaatcgatattaatcatgtagttacaaattggcaccttaccaacttaaactttaaaaaagaaaccttataaatactattaactttcattttaaaaatcaattcatcattgtgtgcggtggatcacacctaaaaggcgagacgatcgttacattactttcaaactgaaggttattaaccaaaaataacttacaagatgaaaacagaggactaaaatgtacatcatttccagtaaaaacatgctattaaaagctcagcgacagagttatgccgtgccggctttcaatatccataacctcgaaaccatgcaggtcgttgttgaaacggcggctgagttgcgctcccccttgatccttgccggcacccccggtacctacagctatgccggcaccggcaacgtggtggcgatcgcccgcgatctggcaaaaaagtgggatctcccgctcgccctgcacctcgatcatcacgaggatctggctgatatcacgcgcaaagtgcaggcagggatccgctcggtcatgatcgatggctctcactcaccgttcgaggagaatgtggcactggtaaaaagcgtggtggagttgagccaccgctatgatgccagcgttgaagccgagctgggccgtctgggcggagttgaagacgatctggtggtcgatgctaaagatgcgctctataccaaccccgaacaggcccgcgaatttgtcgctcgtaccggtattgattcgctggccgtcgccattggtaccgcgcacggcctttacaccgccgaaccgaagcttgattttgagcgcctggcggctattcgcgactgcgttgacgttccgctggttctgcatggcgcttccggcctgccggatagtgatattcgtcgcgccatttctctgggcgtatgcaaagtcaacgtcgccaccgaactaaaaatcgctttctcggatgcgctgaaagcctacttcctggaaaatccgggcgccaacgatcctcgtcactatatgaaaccggcgaaagcggcaatgaaagaggtcgttcgcaaagtcattcacgtttgtggctgcgaaggacaactgtaatcagcggatcgaaggagccttgttgtgatccacaccctgacactgaataccgcgatcgatatgaatatcttttgcgatccgctccagccggcggcagtcaaccgcacccggcaaacggaatattgcccgaatggtaaaggggttaacgtctcgctggtattacatcattaccagcagccaacccatgtcatgggcatattcggcggttttaccggccgctatatcgttgaggaactacgcaaacagcatattaatgtcacaccggcatgggtcgctgaaccgacccgtataaatatatttattaacgacggcagtgatgaatacaaactggtaaatcccggcgcgcggattgacgatgaaggaaaagaacaaattcttcaccatttacagtgcgtcgcgcccggtgattatttagttatcagcggcagtctgccaccgggaatagagagccggttctatagcgagattctggtgctgtgccagcagaaagggtgtgaagtcatcttagatatcagccacccggtgctgcgccagctgttagagtggcgtccactattgattaaacccaatgacgacgagctgaaagagatctttggtctggatgtcagcagcccccggcgggtacgcgaagcaatgcaaacgctccaccagctcggggctcgcaatgttctgctgacccttggcgcgcaagggctctatttttcgaacggcgcgcaactgtggttctgctcggcaccgaaaatcgaactggtcagctcggcctgcgccggcgatgccgcgctgggtgcattcctcagccattggcttaacacagacgatattccccaggccctggcgctggccagcgccaccggcgctgatgtggccgcctccgccgggctgggtaaattaaaccgtacgcaagaattattacaacaacttcagatcgtccaattataaaggtccgattatgaaaaaaattattgccgtgaccggctgccctacaggtattgctcatacatttatggctgaagaggccttaaaaaccgcagcgaaaaaattaaacgttgaaataaaagtcgaaaccaatggcgcttccggcgtagaaaacgccattacgccggaagacctgaaggatatttatggcgtgattatcgctgccgataaagatgttaatgccgaacgttttaatggtttaccggttattgaggtgccggttaaagaagccattcatcatccggcggaattaattaataaagtcgttaacggtcaggcgccgcgtcgtcagggattctccgcggcaacggatccagacgagaaatatgagcgagaatcgttcggccgacagatttacaaacatctgatgagcggcgtttccaacatgctaccgttcgttgtcgccggcgggatcttaatcgctgtatctttcttatggggcatctactccgccgacccgaattcaccgcagtataacgtgattgccgccacgctgatgaaagtcggtcagcaggcgttctcgatcatggtgccggtgtttaccgcctacattgcctggtcgatatctggccgccctggcatggttgccggttttgtcggcggtctgctggcgaacgccaccggcgccgggtttctcggtgggatcatcgccggttttgccgccggatattttatgctgctgatccgtcatctgctcgacggtctgccgcgccagtacgaagggctgaagtcgatctttattatgccgctgatcggcgtcctggtgatcggcgtgatgatggttctgctcggccagccggtggcagcgatcaacaatggcatgatgaactggctcagctctttacaggaagccaacccaatcctgctggggatcgtggtaggcgcaatgtgctccttcgacttcggcgggccggtcaacaaagcggcctatgtcaccggtacgttgctgctgggtcaaggtaactacttctttatggccggtgtatctgccgcctgcatcacgccgccgctggtcatcgctctggcgaccacgttctttccgaaaggctttagcgaggaggaacgcgccgccgggatggtcaactatatcctcggctgcacacacattaccgaaggtgcaattccctttgccgccaaggatccgctgcgggtgatcccgatgatgatgatcgcctcctcaatttctgcggtactcagctacagcctgcatattcaggttccggcaccgcacggcggcttcttaatcctgccgctggtcagtaaaccgttgatgtgggtgctgtgcattctcgccggttccgcctgcggggcacttatgctgggatgctggcggctgtggcaaaaacgcactgacaaagcgacagctcttgctggcgccatgaaataaggagcaagctatgcaactgacttctgccgatatttgtttcgatcgtcaggtcaaaacaaaagacgaggcgctacagcgtgtcgttgcagccctgacccatgccggacatacgcgggcagactatctacaaggcatgcgcgagcgcgaggggcaaatcagcacctatctgggcaacggcattgccattccccacggtacgccgcacagtcgcgacgcagtgcttaaaacgggcgttaaggtgctggcttgtccgcagggggttgactggggtgaggagcaaaccgcctatctgattgtcggtatcgcggctcaggacaatgagcatctcgatattttgcgccagctcacccatgctctgggcgatgatcgagtacctgaggcgctgacgcgcgctgataccccccaggcggtgctggaaattctcgccggcgacattcctctgccagcaggcgaagaaccacaacccgcgccgcaatttgacgaagaggccacctttaccctgcgtaatccgcacgggctacatgcccgtcccagcgcggtgctggtgaaagccgtcaagcagtggcgatcgcaaatccgggtcgaaaaccttgatacgcgctccgccattgttgatgccaagaatctgatgcgcgtcgtatcgctgggcgccaaacagggtcatcgtctgcactttatggccagcggcaacgatgcgcagcaggcgttaaaagccattggtgacgcttttaacgccggtctcggcgaaattgccgcccagccgcagcaggtctcccaggaagccgtcaaaacgaaacgcagctggctatcccgaatatttagttaattttcaatcaattaaaaacgccctgtcttcgtgatcagggcgtttttgtctcgaaagacgatacctttcactgcgttacaccactatttatcgatacagatcacaaatcaaaacaaagccatttgcgaccaaaacaaaacataacgaatatattcgaaagaaaacggaggttgtaaatgaaagacattatcactcgccataagtcaggcgaacatatcggtatctgttcagtatgttcggcgcatccgctggttatcgaagcggcgttacgtttcgacctgtcgaccaacaataaggtgctgatcgaagcgacgtccaaccaggtgaatcagtttggtggctacaccggcatgcagccggccgatttccgcgacttcgtctacaacatcgcgcgtaccgtcggttttccggcggagcgcattattcttggcggcgaccatcttggaccgaactgctggcaagacgaaccggccgccgtggcgatggaaaaatcaatcgacctgatcaaagcctacgtcgccgccggctttagtaaaatccatctcgatgcatcaatgtcctgtgctgacgatccggtgccgctggatcctggtgtggttgctgagcgcgccgctcgcctgtgtcaggctgccgaagagaccgccagcgatgagcaaaagcgccacctgacctacgtcatcgggaccgaagttccggttcctggcggcgaggccagcaccatcggcagcgtacatgtcacccgggcgcaggatgccgccgcgacgctcgaaacccatgaagccgccttccgtaagctggggctcgacgccgcgctggagcgagttatcgccatcgtcgtgcagcccggcgtggagttcgaccatacgcaaatcattcattaccagccgcaggaagcgaaagcgctctccgcctggatcgaaagcaccccgatggtctacgaagcgcactccaccgactaccagacccgccaggcttatcgtgcgctggtccgcgaccacttcgccattctgaaagtcggcccggcgctcacctttgccctgcgtgaagccatctttgccctcgcccaaatggaaaatgagctgatcgccccggagtctcgcagtcgcgtgatggaggtgatcgacgaagtgatgcttaacgaacccggctactggaaaaaatactatcgccccacctggagccaggcgatggtcgatatccacttcagcctttccgaccgtatccgttattactggccgcatccgcgtattcgccaaagcgttgagaaacttatcgctaatctgaccgacgctaaactaccgctggggcttatcagccagtatatgccggtgcagtttgaacgactgtcgctgaatgaactgaacgccgagccgcacgcgctgatcctcgacaaaatccaggatgtcctgcgtgcctatcgctacggctgttcttctgaaaccgcgtgaagttaagaggatatatgagtcaactgtttgttcgtaccggcattcatttcagttccagtcagcaggcactggaacacattggcgcagagatgctggcgcgaggcgtcgtacatgacagctatcccgccgccctgctcgaacgcgaagcgacttttcccaccggcatcgccctggagaagcatgctgtcgctatcccgcactgcgaagcgatccacgcgaaatcaccggccatttacctgatacgtccggacatgccggtctcttttcagcgcgctgacgacgacggcgaaatcgacgtttcgctcatcatcgcgctgattgttgaaaacccggcggcacagctgaagctgctgcgccggttatttagtgagctacaaaatccgcacacgctggaggcactgctcgccgcttccgacgatcggctgccggtgcggttccagcaattaatccttgagcccgagcttagcgccgtggcttcataagatactgataataaaaggggtaccctatgaaacgtaaagttatcgtcgcctgcggcggtgccgtcgccacctccacgatggcggcagaagagattaaagagctatgtgcagaccacaatattgaactggatttggtgcagtgccgggtcaatgaaatcgaaacctacatggacggggcggacctgatctgcaccaccgcgcgcgtggagcggaccttcggcgacattccggtggtgcacggcatgccattcgtctcgggcgtcggcattgaagccttacaacagaaaatcctcggcatcctcgcggagtaaacgccatgtttagcgaaatcatgcgttatatcctcgatctcggtccgacggtgatgctgccgatcgtgatcattatcttctccaaattactggggatgaagctcggggattgttttaaatccggtctacatatcgggatcgggtttgtcggcatcgggctggtcattggcctgatgctcgactccatcggcccggcggcaaaggcgatggcggagcatttccagattaatcttcacgtgatagacatcggttggccgggttcatcaccgatgacctgggcgtcgcaaatcgccctggtggcgatcccggtggccatcgcggtcaatatcgtgatgctggttacccgtatgacccgcgtggtgaatgttgatatctggaacatctggcatatgacctttaccggcgcaatgctgcatatcgcgaccgggtcgtactggataggtattctcggcgtggtggtgcatgctgcttttgtgtataagctgggcgattggtttgccaaagatacccgcgatttcttcggcctcgagggtattgcgatcccgcacggcagttcggcgtatttagggccagttgccgtcctcgtggataccatcatcgacaagatccccggtcttaaccgtattcactttagcgccgatgacattcagaaacgcttcggccccttcggtgaaccggttaccgttggcttcgtcatggggctggtgattggcgcgctggcgggttacgacctgaagggcattcttcagctggcggtgaaaaccgcagcggtgatgctgctgatgccccgggtgatcaaaccgattatggatggcctcaccccgatagccaaacaggcgcgtaaacgtctgcaggctaaattcggcggccaggaattcctgattggtctcgatccggcgctgctgctcggtcatacctcggtagtctcggccagcctgattttcatcccgctgaccattcttatcgccgtcgtggtccctggcaaccaggttctgccatttggtgacctggccaccatcggcttcttcgtagcgatggcagtggctgtacatcagggcaatctgttccgcacgttgatttccggggtcatcattatgggaatcaccctgtggatcgccacccagaccattggcctgcacacccagctggcggcaaacgccggggccctgaaagccggcggcatggtggcctcaatggaccagggtggttcgccgattacctggctgctgatccagctctttacctggcaaaatgtggttggcttcgcggtcatcggcatcatctatctggccggcgttctactgacctggcgtcgcgctcgcggcttcatcgccgcggaaaaagcagaaaaaagcgctgccccgcaacaaagtacaggcatgtcttgatctaaaaggggagcgttcgctcccctgaatcttatagctggagaatgttatgaaatcagtggtaatccatgctgaggggaacgtctgcgttgaagaacgccctatccccacgctgcaaacggaaaacgatgtcctggtcaaagtggtcagttccgggttatgcggctccgatatcccgcgcattttcgccaaaggggcgcattactaccctattacgctggggcacgaattcagcggttatgtggaatcctacggcgcggcggtaaccgacctgcagcccggcgatgccgtcgcctgcgtgccgctgctgccttgcttccagtgcccgcaatgccagcgcgagtatttctctttatgtaaacagtatcagttcgtcggctcacgcagcgaaggcggcaacgccgaatatgtggtggtaaagcgcgccaacctgttccgcctgccggaccagatgccaattgatgatggcgcgtttatcgaaccgataaccgttggcctgcacgcttttcatctggcgcagggctgtgaaggtaaaaacgtgattattatcggcgccggcaccatcggcctgctggcgctacagtgcgcccgcgaactgggcgccaacagcgtcacggcgatcgatatcaatccgcagaagctggagctggccaaaaccctcggcgcaacccatgtgttcaacagtcgcgagatgagcggccaggcgattcagcaggcgctggaatccattcagttcgaccagttagtcctcgagaccgccggtacgccgcagaccgtcgcgctggcgattgaggccgccggtccgcgggcgcagctggcgttggttggcacgcttcatcacgatttaaccctcccggcagccaccttcgggcagattctgcgtaaggagttgaatattgtgggtagctggatgaactactctggcccgtggccgggagaagagtggcaaacggccacccgtctgctgactgaaaaacgcctgcagctggcgccgctgatcgcccatcgtggcgacgcagaaagcttcgctcgtgcagtgcaggcgctcaacggcgcgccaatgcaaggcaaaatcctgctcaaactctcttgaccgcccgagccagccatcagcgctggctcatccaacctttcgaaaattatcgttcacctttcgttacccttcgattacactgagatgagttaattatcaggcaaatcaagatgaactcatttgaacgaaggaacaaaattgtcgatatggtgaatacgcagggtagcgtattggttctagacctttcgaatctctttggcatctctgaggtaacgatccgtgccgatctccgcttactggaagaaaaaggactgttaacccgttttcacggcggcgccgcccgtgcgggtagcgacctgaccgacgccgagaatcaggaagtggtgcttgaagaccgctatcagcttgccagcgatcccaaaaagcgcatcgcccatgccgcggcagcgatgatccgtgaaggtatgacggtaatcctcgatagcggtagcaccactcttcttatcgccgaggcattagtacggatgaccaatatcaccgtcatcaccaacagcctgcccgccgcgtttactctggcagaaaataaagatatcaccctggtggtgtgcggcggtaccgtgcggcacaaaacgcattcgatgcacggcacgattgccgaacgttcgctgcaaggtatttgcgccgatttgatgtttgtcggcgccgacggtatcgacgccaccaatggcatcaccacctttaacgaaggctactccatcagcagcgtgatggccgccgccgcgcatcaggtgatcgccgtgctcgacgccagcaaattcaatcgccggggctttaaccaggtactgccgatggaaaagatagactgcgtgatcaccgacgacggcattagtgaaaatgaccgtgcagcgttaagcagcaaaaaggtggaactgaagatagtgtaattgcacgctgagtggaacatcatggcggctggttctacttaaccagccagcttccaccttttttggcgcctatgcgaatcaatctccctttcgcctgtagcccttgcagatgacgctcaaccgtacgtgctgatatccccaagatctccgccagcgctctcgccgttaattccggcttttcggttagcaaacgcaaaattgcgttttccggtggggctaatttgacgtcgatttcttccgacatttcttccgacatttcttccgacacgatgaatgaagtttccagaccttctttcagcgccgccaggatattttgcaacatccaggtcacgaatagcgtgcaatcactggttttatcacaagcacctaaaatgtcgtaataacgttcttgctgatggtggatcagcgtttcaaccggcagccaggccaattcctgacgccactggcttagaatcaacgtctgccataaacgccccatccgaccattgccatcagcgaaagggtgaatgaactcaaactcgtagtgaaaaactgaactggcaattaaaggatgtagctcggtgtgttccagccaactgagtaaatcagcgatcaatcttgggacctgggcagcaggcggagccatatgtatcacctgcgtaccgcgataaatgccgacgtttccgccacgtaaagcgcctggacgatcaaccagcccggtcatcagcgttttatgcgccgtcagaagatcgctaatgtttgccgcatgccatccgggcattaattcataagcacgaatggcatttctcacttcctgaatatccttagccggcgccagaacccgtttgccttccagcagcgccgttacctgttccatgctcaggctattatgttcaatcgcgagtgacgcctgaatagtacgaatgcggttttctttacgcagcaacggcgatgcttgtccacgtttcgccgaccaatgcccaagcaattccccaatctcaacgacaaggttgaggaccgagggtgtgatgctaaacggcggttggtaacggctcatcgtttactccccctgctgctccagggcgtacttatacaacgcgtttttcttcacgccgtggatttccgcggccagcgcggcggctttcttcagcggcagctccgcctgcagcagcaccagagtacgcagcgcggccgccggcagcgcctcttcctgagccttgaaaccttcgacgatcagcaccatctcgcctttgcgacggttttcatcttccttcacccacgccaccagctcaccaatcggcgcgccatggatcgactcccaggttttggtcagctcacgagccagcaccacatagcgggattctcccagtaccgcgcagatatcctccagactctccaccagacggtgggtcgactcatagaaaataagggtgcgcggctcttcttccagcgctttcagggtatcgcggcggcctttcgatttcgccggcaggaagccttcataacagaaacggtcggaaggcaggccggcggcgctcagggcggcgatagccgcacaggggcccggcagcggcaccacgcgaatattcgcttcgcggcaggtgcgcaccagatggtaaccaggatcgttaatcagcggcgtgccggcatcggaaaccagcgcgatgttttgcccttctttcagtttggcaagcagggtttccgccttttgctgctcattatggtcgtgaagcgcaaacaaacgggcgtttatcgcaaaatgttgcagcagcaaaccggtatgacgggtatcttccgctgcaattaaatcaacggcttgcagcacttccagtgcacgctgcgtgatatcagacagatttcctatcggagtgggcacaatatagagctgcccctgagaattatccgctgattcgtgttgtttcattgtctcgtccgtattgccgatttaatattgagcattgagccaaaaaaatatcactggacacttatggtaccgtcaacatttcttcgttctaagcccgcgcgctgcctgcccgtattgctggcgactcttatttttgctggctgcggcacccacacgcaggatcaaagcgcggcgtttatgcagggtacgtcgcaggccaactccagtttctacttacagcagatgcagcaaagcacgaatgatagcaagaccaactggcaattactcgccattcgtgcactactgcaggaagggaagaagcagcaggctatcgacctgtttaaccagctgccggcgaacctgaacagcactcaggcccgtgaacagtcgctgctggcggtggaagtgaagctggcgcagaacgattatcaggccgcccgtaatctgctggctaagatcgatccgacaaaccttgagcagcctcagcaggcgcgctactggcaggcgcaaatcgatgccagccagggtaaaccatcgctgaccctgctgcgcgccttaatcgcccagcagccgctgctgagtgacgccaaacagcgtcagaaaaatattgatgcgacctggcaagcgctcacctcgatgccccaggaccaggccaatgcgctggtgatcaacgccgatgaaaatatcctccagggctggctggatctgcagcggatgtggtttgacaaccgcaacgatccgacgctactgaaagcgggcgttaaagactggcagacgcgctatccgcaaaacccgggcgctaaaatgctgccgacggcgcttgtgaatatgcaaaactataagcctgcgtccatcaacaagattgcgctttttctgccgctgaacggtcaggcgtcgatcttcggccgcactatccagcagggctttgaagccgctaaaaacggcgcgccgtcggtgacgggcagcgcggttcccgcccaggtcgcccaggcggcgaatgtctccggtaatgatgatgtggtgagtccgtcgcaggcagaaatcagcgatcttaccgccaccggaagccgcgcggatccggttcaggccccgacgcaggaccaggcagcgcctgctgcggaaccggcagcccaggcgccggcaacatccaccacgccgcagactaccgcttccccggccacccagccggttaccgcgccggccgcacagccgcagcccgtggtcgcaaccgccgctaacccttctgcggaactgaaaatttacgacaccaccacccagccgataagccagctgctcgcccaggcgcagcaggatggcgccaccctggtggttgggccgttgctgaaagaaaacgttgaagaggttatcaagagcaacacgccgctcaatgtgctggccctcaaccagccggaaaaagtcgaaagccgcgctaacctctgctatttcgcgctttctccggaagacgaagcgcgtgacgccgcccgacatatccaccaacaggggaaacagaccccgctgctgctggttccgcgcggcgcgctgggcgatcgtgtggttagcgcttttgccgacgagtggctgaagctgggcggcgccagcgtcctgcagcagcgttttggatccacggccgagctgcgcgccggcgtgaacggcggcgggggcattgcgctgagcggcaccccggtctccaccctgccatcagcgcagaacagcatcctcggcagtgcggatgagatgccggtaagcagcggcggcagcgtcgatgcggcctatatcctcgccaccccggaacagattgcctatatcaaaccgatgatcgccatgcgcaacggcagccagagcaatgtcaccctgtacgccagctcgcgcagcgcccagggcaccgcggggccggatttccgtctggaaatggaaggcttgcagtatagtgagatcccaatgctggccggcagcaatccgtcgctaatgcagcaggcgctgtccgcggtgcgtaatgactactcgctggcgcgtctgtatgccatgggcgctgacgcctggtcactggcaaatcacttcacgcaaatgcgccagacgcctggcttcgagctgaacggcaataccggcgatctgacggccaaccaggattgcgtgattaacaggaaactgtcatggctcaagtaccagcagggaaaaatcgttccggccagctaagcaaacagaccggcgatgcctgggaaaaccaggctcgccgctggctggaaggccagggcctgcgttttatcgccgccaatgcccgcgagcgtggcggcgaaattgaccttatcatgcgcgacggcacggtcaccgtttttatcgaagtgcgctaccgccgtagcgcccggtacggtgatgcggcagccagcgtcactccgcaaaaacaacaacgactgcttaaagccgcccgtttgtggctctgccgacagaatgggagctttgagactgtggattgccgtttcgatgtggtagccttcaccggaaacgacatccaatggctaaaaaacgcctttggcgaatagcgtaataccagaagtaagggatcccgtgctcgacagaatcaaagcctgctttaccgaaagcattcaaacccaaattgccgcagcggaagcactcccggacgccatctcccgggcggcgatgacgctcgtccagtccctgcttaacggcaacaaaatcctctgttgtggtaatggcacctccgccgccaacgcacagcattttgctgccagcatgattaatcgctttgaaacggaacgccctggtttacctgccattgcactaaataccgataatgtggtcttaaccgccatcgctaacgatcgcttgcatgacgagatctacgccaagcaggtgcgcgccctgggacacgccggcgatgtgctgctggcgatctctacgcgcggaaacagtcgggacatcgtcaaggcggtggaagccgccgtgacccgcgacatgaccatcgtcgcgttaaccggctatgacggcggtgagctggcgggcctgttaggtcaacaggatgtcgaaatccgcatcccctcccatcgcagcgcgcgtatccaggagatgcacatgctgaccgtcaactgtctgtgcgatttgatagataacactctttttccacaccaggacgattaaggagaacacatgaaggctctctcgcccctcgccatcctgctttctgcactactgctgcagggctgcgttgccgccgcggtagtcggaacggcagcagtcggcaccaaagccgcaacggacccgcgtacggtgggaacccaggtcgatgacagtaccctggaactgcgcgtcaatagcgccttgtcgaaagatgaacagattaagaaacaggcccgtatcaacgtcaccgcttatcagggcaaagtcctgctgaccggccagtcgccgacgccggacctctccgcgcgcgccaagcaaatcgccatgggcgtggaagggaccacggaagtgtttaatgaagtgcgccagggccagccgattggtttaggcaccgcctcgtctgatacctggattaccaccaaggtgcgttcgcagctcctgagcaccgatcaggtcaaatcctcgaacgtgaaagtaaccacggaaaacagcgaagtcttcctgatggggctggtgaccgaccgcgaaggccgggcggcggcggatattgccagccgggtaagcggcgtatcccgggtgaccaccgcctttagctacattaaataaagctgcagtttcccggctggcgctgcgcttagccgggctaccgccccctgtccgttgtgtgccgggtaaggcgtagccgccacccggcatccaatccggctatgcgtacgtttacggcaaactacaccagcgccagcgcaccgacaatcgccccgcacagcgccaccagtccgcccgtcagccacagcgctttggccgggaaggctttacgcagcataatcagcgacggcacgctcactgccggcagtgtgatgagcagcgccagcgcgggcgccgtccccatacccgccagcatcatcgactgcacaatcggaatttccgccgcggtagggatcacaaacaggcagccggcgatcgccatcgcgataacccagaacaacgtattatccaccacgccatcggcgtgcgggaacagccagacgcgcgccgctcccagcaccagcaccgcgaggatataaaccgggatcgtgttccagaacagcgtccacagcgcccgcagccagcggctaaagaagccgccctgagtcgcttccgacggtgcagcaggcaccgctaccggctgcgtcgccgcctctttcacccatttctgcaccagcgtcgccacagttaatactgtcgccagacccgccaccaggcgaaccagcgcaaactgccagcccagaacaaagcccataaacaccagcgtcgccggattgagtagcgggttccccatccagaacgccagcgccccgcccatcgacacctgctgtttgcgcatcccggccgcgaccggcgcggcgcagcaggtgcacatcatgccgggcagcgagaaaatcgctcccagcagcgtgccctgaaaccgcgattgtcccagggtgcgtagcagccagtcgcgcggaatgagtacctgaatcaacgacccgagcagcacgccgagcaccgccgctttccagacggcaaggaagtaaaccatcgcatagtcccacgccgccatcagcgggttagcgtcggcctgggcgagaatagatttaccgatactgtgggtttccgcagcggtgaaggctttcccgtagtacggctgccatttgacgtaccacagaccaacaatcacgacgagaaagaaaagcgcgggtttccaccattgaaatggtgacgccgcctgagatgaagactgaccagccatagcattccccagcaagaaatgtggatatgaattgaagccgtgaatactacgccggaagcctgcgtttgcaaaccgctattcagcctgccgcgcggcgcgctcccgtagttccgatgatgtcagaattcgcaccccttcgtgggtgggcgacagcgcctccgccagcagggcgatcgccacatcgcgggccgcaatggatttccagttccccggcaagagccggaacaatggtgcgaggaaggtctcattggcccgctttttttcccgctcgcctgacagcatcgacggcctggcgatggtcagccgcggccagtcttgctcaatcagcgccgcctccatttctcccttcacccgattgtagaaaaacggcgagtgggcgttggcgcccatcgcgctaaccaccagcatatgttgcgcacccagtcgtttgccggtcagcgcggtatcaaccaccagcgtgtagtcagcatggacgaaggcctctttgctcccggcctcccggcgcgtcgttcccaggcaacagaagacgatatccaccgggtcaaccacctgcgccagggcatcggtcagctggggatcgtgaggattaaagacaccttccgctggcgccagcgggcgacgcgtcggcgcggcgatggtgcttatacggggctcattctgcagcagccggagtaagtgaccgccaactaacccggtcgcgccggttaataatacctgactcattggttctcctttacagaattctccgccttgcactttcaggctcatgttccaggcttaataccttacaaggtaagtatccaccatcatcatggaattacctcattgaccatccagacagtggaggaagcatgagtaaaaagatagccgtcctcattaccgacgactttgaagattctgaatttacctctcccgccgaagcctttaagctcgccgggcatcaggtcatcacgatcgaaaagcaggctggcaaaacggtgaagggtaagcagggagaagccgaggtcgccatcgacagagccatcgatgacgtcacaccgggtgaatttgatgccttattgctgcccgggggctactctcccgaccagctgcgtggtgatgaacgcttcgtcacctttacccgcgattttgtcaacggcggtaagccggtgtttgccatctgccacggcccgcagctgctgatcagcgccgatgtgatccgcggacgtaagctcacggcggtgaaaccgattgtggtggatgtgaaaaacgccgggggcgagttttacgaccaggaggtggtggtcgataacgaacagctggtcaccagcagaacgccggacgatctaccggccttcaatcgcgaagcgctacgcctgctcggcgccggcatcacgccgccagtgtaattttttcccgaaacccagcgtgttgtcggtaaatttgatttcgtccggacgaatctcccataccggcgccgacagcatgcgggccaccgggaagcgcttgacgtagcgctggcgcattcgcgcctcttcgtcaccgctcagacgacggatctcgcctttgaactgcacgccgcggatcagggccaccgtttttggctggccgttaaccgtgccggccaccttcgccctctgtccggtcatctggccatggcgggtgtgctcctcgctgagcagataaaaggccacggtatccgggtcatagacgtaaaaggcattcgcgcaccacagctcgtcttcacgggagacgcaccaggtgacgacgtgctgtttactcagccagcgaccaatggcggcaagcgtatccatctttcttctccattatgctatggtgcacacaccttaccatagtgactttgtgaccgtgtgctggtttctgtatctcattcgaaccgcggataatcgcctttataccggcatcaccaccgacgtgccacgccgctttcgccagcatcaggcgggaaaaggcgcgaaggcgttgcgcggcaaaggcgacctgcagctggcctttagccacgaagttggtgaacactcacttgcattgcgactggaatatcgcgtcaagcagctaacgaagcgcgaaaaagagcgcctcgttgccggagaggatgccttcgaaaccctgctggcaaggcttaaagacgattaaagtgctcgctgtattctacctggccatggacgccgtcgagggcgtcatccgccagacggtgaacctggaacgcctcggcgctgtccggccagcggcagcggagatcgaagcgcgcggccggttcaaagccgaagcgacggtataaatccgggtcgcccagcgtcaccaccgcggcgtagccaaactcattcagcgagtccagcccttcataaaccagctgccggccaatgccctgtccgcggtagcgttcatctaccgccagcggcgccaggccgacccactgcagctcttcaccttccaccgccaccgggctgaaggcaacgtagccgatcacctggccttcatcatccgtcgccactacccccagcgtgatcagtccatcttcacgcagatcgtgcaccagctgcgcttcggcatcgcggccgaaggtacgacgcagcagcgcgtcgattcccggtgcatcaatcccaatctccactcgaatcagcatgcctcacctaccgatgtctgttcaggtttctgcgggctcttcagtccagcttcgacaaaatccgccagttgcagcaacatcacgcgcagcgcttttggcatctgctcgagctcaatggcgtccatcaaattttttacatacagccccagctccgtatcgccttcaatgaccagacgacgctggaagaatagcgtatccggatcctgcttgcgcgcggcgatcattaacagatcgctggcgtcggcgctgaagctgacgtcggcgtcggcctgctggctgaccaccagtcgaccatcgactaccgaggtataccacagcagaccgatgtcacgcacatgaatacttaaccaacgcccctcaagaaactccagctccccctccgccagcgcctggcgaaactgccagctcagcacttgctccagcacctggcgcttgagggcaaaaggcgccagcttaaccggcacgctcattaaagacgggccaaagtggaccagccgggaacgcagtttatccaacacaagctttactccatgaatgcaatagttccgctattgtgccatatcacataaacaacatagcggcgtaaatcaacaaaaacgcgatgacggccgccagttattggcgccgccaatacacttttaactgcctcaaatcaaaaattgtcaccagaaggttaactaaaatccctgctcgttaaccattcagcgtccctgacgggccgcatttttcaggaaaaattatggagctgctctgcccagccggtaaccttccggcgcttaaggcggccatcgaaaacggcgccgatgccgtctatatcgggctgaaagatgacaccaacgcccgccactttgccggccttaatttcaccgaaaagaaactgcaggaagccgtcagctttgtgcatcagcaccgtcgtaagctgcatatcgccatcaataccttcgctcatcccgacggctacgcccgctggcagcgagcagtggatatggccgctcagctgggcgccgatgcgctcattctggccgatatcgccatgctggagtacgctgcggagcgttacccacacattgagcgtcacgtttcggtgcaggcttccgccaccaatgaagaggccattcgcttctatcatcgcaacttcgacgtcgcgcgcgtcgtactgccgcgcgtgttgtctattcatcaggtgaaacagttggcccgcgctacgccggtgccgctggaagtcttcgccttcggcagcctgtgcatcatggcggaaggccgctgctatctctcttcctacctgaccggcgaatcgcccaacaccgtcggcgcctgttcgcctgcccgcttcgtacgctggcagcaaacgccgcaggggctggaatcgcgtctcaatgaagtgctgattgaccgttatcaggatggcgaaaatgccggttatccgacgctgtgcaaaggccgctacctggttgatggcgagcgctatcacgcgctggaggagcccaccagcctcaacaccctggaactgttgccggaattgatggccgccaatatcgcctcggtgaaaatcgaaggccgtcagcgcagcccggcttacgtgacccaggtggcgaaagtctggcgccaggcgatcgatcgctgccaagccgatccgcagaatttcgtaccgcagtccgcctggatggagaccctgggcgccatgtccgaggggacacaaactacccttggcgcttatcaccgtaaatggcagtgagaaacatgaaatattcattagggccggtgctgtactactggccaaaagagacgctggaagatttttaccagcaggcggcaaactgcagcgccgacaccatttatctcggcgaagcggtatgcagcaaacgccgcgccaccaaagttggcgactggatcgaaatggcgaaaacgctggccgctagcggcaagcagattgtgctctccaccctcgcgctggtgcaggcctcttctgaactgggcgagctgaagcgctatgtcgataacggcgaatttctgattgaggccagcgatttgggcgtggtaaatctctgcgccgaacgcaagctaccgttcgtcgccgggcatgcgctgaactgctacaacgccgtcaccctgcgcctgctgcggaaacagggcatggtgcgctggtgcatgccggtggaactctcccgtgactggctggctaatttactgacccagtgcgaagagctgggtatccgcaaccagtttgaagtcgaagtgctgagctacggccatctgccgctggcttattccgcgcgctgctttaccgcccgctcggaagaccggccaaaggacgagtgcgaaacctgctgcatcaagtaccctaccgggcgcagcatgctgtcgcaggagaaccagcaggtgttcgtgctcaacggtattcagaccatgagcggctacgtctataacctgggcaatgagctgacctccatgcacggcctggtggatatggtgcgcctgtcgccgatgggcaacgagaccttcgccatgctcgaggccttccgcgccaacgaaaacggcgctgcgccgctggatctcaccagcaatagcgattgcaacggctactggaaacgattgccaggactggtgcttcatgcctgataaaccgctcactttgttaacaacagtgctcagattttaatgcattattaaaaatgcagcttttctggctggcgcgtccaggatgcgccaggctggaagaagaccttcaatctgatgacgatgctgtagcaaagtgagcctttatgactgacaaatctgttccattctcggtgctcgatctggcgccgatcccgcaaggatcttctgccaaagaagcctttacccactctctggatctcgcccggctggccgaatcgcgcggctatcatcgctactggctggcggagcaccataatatggtcggcattgccagcgcagcgacctcggtgctgattggctatctcgccgccaacaccaccaccctgcatctcgggtccggcggcgtgatgctgcctaaccactctccactggtgatagctgagcagttcggcaccctgaacaccctttaccccgggcggatcgacctcggccttggccgcgcgccgggcagcgatcagccgaccatgcgcgccctgcgtcgccatatgagcggcgatgtcgataatttcccgcgcgatgtagcggaactggtggactggtttgacgcccgcgatccgaacccgcacgtgcgcccggttcccggctacggggagcgcattccagtatggctgctgggctcaagcctctatagcgcgcaactggcggcgcagctcggcctgccgtttgccttcgcctcgcacttcgcgccggatatgttgttccaggccctacatctgtatcgcagcaatttcaaaccttcggcgcggctggaaaaaccgtacgcgatggtgtgtatcaatatcatcgccgccgacagcaaccgcgatgcggagtttctcttcacctccatgcagcaggcgtttgtgaagctgcgtcgcggcgagaccgggcagttgccgccgccggtggaaaatatgcatcagctgtggtcagcgtccgagcagtatggtgtgcagcaggcactgagcatgtcgctggtcggcgataaaactaaagtccgccatgggctagagtcgattctgcgtgaaaccgaggcggacgaaatcatggtcaatggccagatcttcgaccaccaggcgcgtctgcattctttcgatttagcgatgcaggtgaaagaggagctgttggggtaacacacacgtcagcccggtggacgtcgcgccaccgggcaatagctttactgataaaccggcagcagattgacgctcgacaggatatgtacaaccgcattgccgaggccaaagagcaggatcagcacaatcattggcgttccgccccaaacgcggaactgtgggctgccgaagcgtttgcgtgagacgcgagccagcagcgccggtacaatcgccgcccagatcgtcgccgccaggccagcatagccgatggcgtagaggaaaccatcgggtttgaccagtccgccaatcatcggcgggataaaggtcagcagcgcggttttaaagcgtcccatcgcgctatcgtcaaagccaaacagatccgccaggtagtcgaacagccccagcgtcacgccgaggaatgaactggcgacggcaaagttcgagaataccaccagcagcagatccaggctccgactattcagcacgccgctcaacgcctgcaccagcacatcaatgttgccgcccttctgcgcgatgtcgataaactgcggacgagggatgttacccatcgtcaccagcagccaaacgacatacagacccagcgccagcagcgtaccgtaggttaagcagcggatgatggtgcgcggatcttttccgtagtatttcatcaagctcggcacgttgccgtgatagccaaaggaggccaggcagaacgggagcgtcatcagcaggtatggcgcataggaggcattcttctccgcaacgttaaatagcgtcgtcggctcgacgtgcccgagcaggctaccgaaggtcaggaagaaggtgatcaccttagcgcccagtacgatagccgtcatgcggctcaccgctttggtgctcatccagacgataaacgccaccagcagcgcaaagccgaagcccgccgcgcgcgccggcaccttcagcgacagttcactgaaggtgtggtggaggatcgaaccgctcgccgaaatataggcgtaggtcaggatatagagcacaaaggcgattgatacaccgttcaccaggttccagcccttgccgagcaggtctttggtaatggtgtcgaagctggagccgatgcggtagttaagattggcctcgaggatcatcaaaccggagtgcagcatgcagaaccaggtgaagaccagcgccgccagcgaccagaaaaaccacgcgccggacatcaccaccggcagcgagaacatgcccgcgccgataatcgtgccgccgataatcaccacgccgccaaacagagacggacgggttgccgtagtggttagtgtcgccatttaccgaattctccagtcgaaaatacttcgctcacgttgagcatgacgcactgtaccagtacacgagtacaaagggaataaaaaaagccccaatcatgacgatcggggctgtattatttagtttacgctagcgggcggcgttgattacgcatcgccaccgaagcgacggcgaccggctgagtcatcgcggcgcggcgcggatgcatcgtcacgacgcggcgcacggccttcacgacgttcgccgctgaaacgacgtccttcaccacgaccgccttcacgacgttcgccaccgaagccacggccgccttcacgacgctcgccgccaaagccacggccgccttcgcgacgctcaccgccgccacgacgttcggtgcgcggctgcgcatcgcccagcagctgcatgttcatcggcttgttcaggatacgggtacgagtaaagtgctgcagcacttcgcccggcatccctttcggcagctcaatggtggagtgagaagcgaacagcttgatgttaccgatgtaacggctgctgatatcgccttcattggcgatcgcgccaacgatatgacgcacttcaacgccgtcatcgcgacccacttcaatgcgatacagctccatgtcacccacgtcacgacgctcacgcttcggacgatcttcgcgatcgccgcgcgggccgcgatcattacggtcgccacgacggtcgaaacgatcgtcacgatcgcggaattcacgacgtggacgcatcggcgcgtccggcggaacgatcagcgaacgttcgccctgagccatcttcagcagcgcagcagccagcgtttccacgtccagctcttcaccttccgccgtcggctggattttcgccagcagtgcacggtactgatccagatcgctgctttccagctgctgctgaactttcgcggcgaatttttccagacgacgcttgctcagcagctccgcgttaggcagttccacttcaggaatggtcagcttcatagtgcgttcgatgttgcgcagcagacgacgctcgcggttctcaacgaacagcagcgcgcggccagcacgaccggcacgaccagtacggccgatacggtgaacgtaggattcagaatccattgggatgtcgtagttcaccaccaggctgatacgctcaacgtccaggccacgggccgcaacgtcagtcgcaatcaggatatccagacgaccatctttcaggcgttccagagtctgctcacgcagcgcctggttcatgtcgccgttcagcgccgcgctgttgtagccattacgctccagcgcttcagctacttccagggtcgcgtttttggtacggacgaagataatcgccgcatcaaagtcttccgcttccaggaaacgcaccagcgcttcgtttttacgcatgccgtaggcagtccagtagctctggctgatatccgggcgagtcgtcacgctggactgaatgcgcacttcctgcggctctttcataaagcgacgggtaatgcgacggatagcttccggcatggtggcggagaacagcgcggtctgatgcccttccgggatctgcgccataatggtttctacatcttcgataaagcccatgcgcagcatttcatctgcttcatccagtaccaggccgctcagtttggagaggtccagggtgccgcgcttcaggtggtccagcagacgacccggggtaccgacgacgatctgcggaccctgacgcagggcgcgcagctgcacgtcataacgctggccgccgtacagggcaaccacgttcacgccgcgcatatgtttagagaattccgtcattgcttcagcaacctgtaccgccagctcgcgggtcggcgccagcaccagaatctgcggtgctctcagctcaggatcgatgttgttcagcagcggtaaagagaatgctgcggttttaccgctaccggtctgggccatacccagaacgtcgcggccgtccagcagatgcggaatgcactcagcctggatcggagatggtttttcgtaacccagatcggtgagcgcttcaaggataggagccttaaggcccagatctgcaaaagtggtttcgaattcagccatgtagtacgtgtgcctcaaaattaatggcggccagtctacataactcatcgtgaaaatttacggtaattttcattgaaatgtgtgaaccggctcaaagtaggtgtattaacgaacaacaacgccctcacccgcgaaggtgatggcaagcaaaaaactatgggctgatgtgttcgtcagctattgctggtccgattctgccaggtcatcttgctcctggcccaagagcgataattccaacaatgcgtatcggtgctcaacgtagttatgtacgttgttggcgaccgccagtttgaacagtgccgtagcgctgtccttgtcccccagacttaggtagtacttacctaaatagaagttggtttcactgagatgctcagcgagcgaggtgttatccgttgcgtctgccttcagacgagtcatcagctctttttcgctaatgtcgccaaggtagaactcgacaatgttccatccccattgctctttatccgacttgtttaagcgctctctgagtgcttcaagcgcccgcttctcgtcgagtttacgctcggcgatataaagccacaggctacggaaaggatcattgggatcgtcttgataaaacgccagcagatcatcttgcgctaacttagcccggccgccgtaatacagggcgataccgcggttcaagtgcgcgtagttgtaagttggatcaagctcaagtacagaatcaaacgcttcataggcagcatcaaaattgcctgcctgcgttaagtaaatgcctaagtaattgaatacttccggcatatcgggtcggattgccagcgcttgtgaaaaatcatttcgcgctagtgccctcagaccgagactatcatacaacactccgcgctcatataaaagctgtgcgcgttcgtcatcggataaagcccgactggcaagaatttgttccatgcgtgccagaatcacttcttgctgtaaagtcggttgcaatggtactgcgaggacggcgtccttacgccaggcggtgctactgcatcctgccagcgtgagagctgtcgccacgaaacaccagcgcaaaaaaggcttcatttcccactcccgaagacaacgattggatgaacgtcctgttccccggctgcaaacgaggcgtcctgcccgtaaaacgccctccgcaaaaacggagggctaacggcaaccttactcgccctgctcggcagccggagcttccggcgctgcggcagacggagtctgttcagttgcttctttaatgctcagacggacacggccctggcggtcaacttccagaaccttaaccggtacttcctgacccatctgcaggtagtcagtcactttctcaacgcgcttgtcagcgatctgcgagatgtgaaccagaccttctttaccgccgccgatggcaacgaatgcgccaaagtcaacgatacgggtcactttaccattgtagatgcggccaacttcgatctcagcggtgatctcttcgatacgacggatagcatgctgcgctttgtcgccgtcggtcgctgcgatcttcacggtaccgtcatcttcgatctcgatggtagtaccggtctcttcggtcagggcacggataacagaaccgcctttaccgataacgtctttgatcttgtccgggttgatcttgatggtgtggatacgcggtgcgaattcagagatatcgccgcgcggcgcgttaatcgcctgctccatcacgcccaggatgtgcagacgcgcacctttagcctggttcaatgcaacctgcatgatttctttggtgataccttcaattttgatatccatctgcagcgcagagataccgtcgcgggaacccgcaactttgaagtccatatcgccgaggtggtcttcgtcaccgaggatgtcagacagcacgacgaagttgtcgccttctttcaccagacccattgcgatacccgccacagcggcttttaccggcacgcccgcgtccatcagcgccagagaggcgccgcagacggaagccatggaagaggaaccgttagattcggtgatttccgataccacgcgcacggtgtacgggaattcttcaatagtcggcatcacggccagtacgccgcgcttcgccagacgaccgtgaccgatttcacgacgcttcggagaccccaccatgccagtttcgcctacggagtacggagggaagttgtagtggaacaggaaggagtcggtgcgctcgcccatcagttcgtcgatgttctgcgcatcgcgtgcggtacccagagtcgcggtaaccagcgcctgcgtttcgccacgggtgaacagcgcggaaccgtgagtacgcggcagaacgccggtacgaacgtccagaccacggatcatatctttttcacggccatcgatacgcggctcgccggccagtacgcggctacgaaccacgtttttctcgatggcgtgcaggatttcacccagctcgttagcgtccagggtttcatcttcagcaaccagcgtggcgatggtttcagatttgatcacgtcaacctgagcgtaacgctcttgtttgtcggtgatacggtaagcatcgctcagacgggattcagccagcgcagccacgcgcgcgttcagcgcttcgttgaccgcttccggctgccagtcccaacgcggtttaccggcttctttcaccaggtcgttgatgttctgaataacaatctgctgctgctcgtggccgaagaccaccgcgcccagcatctggtcttcgctcagcagttccgcttcggattccaccatcagcacggccgcttcggtaccggcaaccaccaggtccagtttgctggacttcagttcttcctgggttgggttcagtacgtactggtcgttgatgtaacccacgcgcgcagcgccgattgggccattgaacggaataccagacagcgacagcgcagcggaagcaccgatcatcgcgacgatgtctgggttaacctgcgggttaacggaaacgacggtggcgataacctgaacttcgttaacgaagccttccgggaacagcgggcgaaccgggcggtcaatcagacgcgcgatcagggtttcgccttcgcttggacggccttcacgacggaagaaaccacccgggattttaccggcagcgtaggtacgctcctggtagttaacggtcagcgggaaaaagtcctggcctggcttcgcttttttctgacccacaacggtaacgaataccgcagtgtcatccatgctaaccatcacagcggccgttgcctggcgcgccatcatgccggtttccagggtcacggtatgctggccgtactggaatttacgaacgatcggattaagcaaaattctatcctttttatctataaatcacgccatatccacgacatagcgtctattgacccgatcttctgcatcctcgcgactaatgacaacctttacccgcccctgcggatgaagcctctcattagccgcgcgaacctctgcatgaagatcattactagcaacaatacatgagttttgaatgaattgctgccgcccggtcgaaaaaaggggccgtcaggcccctttttctgaaactcgcagaattagcgacgcagacccagacgctcaatcagcgcagagtaacgggcaacatctttacgtttcaggtagtcgagcagtttacgacgctgagaaaccatgcgcagcagaccacgacggctgtggtgatcttttttgtgctctgcaaagtggccctgcaggtggttgatctgtgcggtcagcagtgcaacctgaacttcggtagaaccgctgtcgttttcgccacgaccaaactcagaaacgatttttgctttagcttcaacgcttagagacattttataactccaaaaattaaaagaaagaaagggtgccgatctctaattcagcgacccctgatgcaacgcccgaaaatgttaaaacacgttagcggacgttaagcggcgatattctactcgtagcaggcttttatcgcaagaaaagcgcttacgccgggtattccaccaccagacgacgcggggccacgcggccttcatcgtcaatttcgcccatgccgagaaacttgccggactcgctctccatcacccgcaccagcccgttaagcggcgcgcctgactgacgtaccgggttgccgttcttaaagtagactgcggaggtttctggaatattaaccagcgggtaatccgaggccgggctgtccatcggcatcagcagcggatcaagcaactgagcggcaggaatatcctgcgccgccgcctcatcgaccagcgcctgcagctgctcgagggtcaccatccgctcgaccgggtatttgcttaccgccaggcgacgcaggaaaatcacgtgcgcgccgcagccgagcttctcacctaaatcatcgataatcgtccggatgtaggtgcctttcgagcagtggatctccagctccagctcatcgccttcgcggcgaataaacagcagctcatagacggttatcggccgggcttcccgcggaacttcaataccctggcgagcatattcgtatagcttcttgccctgatatttcagcgccgaatacatcgacggcacctgctgcgtctcgccgcggaagctgtccagcgccgccgccagctgttcgtcgctaaaagtcagcgggcgctcttccaccacctgaccgtcggcatcggaggtatccgtgcgctggccaagtttggcgatcacgcggtaacgcttatcggagtccagcagatactgggaaaacttggtcgcttcgccaaggcagatcggcagcataccggtcgccagcggatccagcgcgccggtatgcccggcgcggttggcattataaatacgttttactttttgcagcacatcgttactggaggcgccctgaggcttgtccagcaacaatacgccatgcacgtcgcggccgcgacgacgaggacgactcatcagtcctccttgctgtcgtccgggttcacacgacgctcatcgtcgtgtttcaccacgctggtgaccaggttggacatacgcatcccttccaccagtgagttgtcgtagaagaaagtcagttccggtacgatgcgcagacgcatcgctttccccagcagagagcggataaagccagaagcttcctgcagcgctttgatgcccgctttcaccgcggcttcatctttgtcgttaaggaaggtgacatacaccttggcataggccaggtcacgggacatttccacaccggaaacggtggtcatcatgcccagacgcggatctttaatttcacgctgcaggatgatggcaatctctttttgcatctcctgggccacacgctgcgggcgaccaaattctttcgccataataagttctccagaataaagacaaaaaaggggccaaaagcccctttttaaaatgattgccgggtggcgcttcgcttccccggctgcttagccatcaaatgattaatcgatgctacgctggatttcgatgatttcgaacacttcgatcatatcgccaacgcgaacgtcgttgtagttcttcacaccgataccacattccatgccgttacggacttcgttaacgtcatctttgaagcggcgcagggattccagctcgccttcatagataaccacgttgtcacgcagaacgcggattgggttgtgacgtttgatcgtcccttcggtaaccatacagcccgcgatggcgccgaatttcggcgatttgaagacatcacgcacttcagccagaccgatgatctgctgtttcagttccggagacagcatgccgctcatcgccgctttcacttcgtcgatcaggttatagatgacggagtagtaacgcagatccaggctttccgcttcgataactttacgcgcagaggcatcggcacgaacgttgaagccaaccagaatcgcgttggatgctgctgccagggtagcgtcggtttcggtgataccacctacgccggaaccgatgatcttcactttcacttcgtcggtagacagtttcagtaaggaatcggaaatcgcttcgacagaaccctgtacgtccgctttcagtacgatgttcacttcgtgaacttcgccttcggtcatgttagcgaacatgttttccagtttagatttctgctgacgcgccagcttaacttcacggaatttgccctgacgatacagcgccacttcacgcgcttttttctcgtcacgcactacggtcacttcatcaccggcagccggcacaccggacaggccgaggatttccaccggaatggacggacccgcttccagcacttcgcgacccagttcgtcacgcatcgcgcgcacacggccatattcgaagccgcacagaacaatgtcgcccttgtgcagagtaccttcgcgaaccagaacggtagctaccggaccacgacctttatcaaggaaggattcgatgaccgcgccgctcgccataccgttgcggaccgctttcagctcaagaacttcagcctgcagcaggatcgcgtccagcaggtcgtcgatgccggtacccgctttcgcggaaacgtggacgaactggctctcgccgccccactcttccggcaggatgccgtactgggacagttcgttcttcacgcgatccggatcggcttctggcttatcgatcttgttcaccgccactaccaccggtacctgcgccgctttagcgtgctggatagcttcgatagtctgcggcatcacgccgtcgtctgccgccaccaccagaaccacgatatccgtcgcctgcgcgccacgagcacgcatggaggtaaacgcggcgtggcccggggtatccaggaaggtgatcatgccgttgtcggtttcgacgtggtaagcaccgatgtgctgggtaataccacccgcttcgccggaggcaaccttggtagaacgaatgtagtccagcagcgaggttttaccgtggtcaacgtgacccataatggtcacgaccggtgcgcgcggttcagccgccgcgccggtgtcacggtcgctcattacggcttcttccagttcgttttcacgacgcaggataactttgtggcccatctcttcggcaaccagctgtgcggtttcctggtcgatgacctggttgatggtcgccatggcgcccagcttcatcatcgctttgatgacctgagaacctttcaccgccatcttgttagccagttcgccaacggtgatggtttcgccgattacgacgtcacggttaacggcctgcgctggcttctggaagccctgctgcagagcggaacctttacggtgcttaccgcctttaccgccgcgaacggccgcgcgggcttcttcacgatcagctttcgattcagcgtgtttgttgcctttcttcgccggacgagccgctttgctgctacggctacggccgcgaccgccttcgacttcacgatcgttatcatcttcagcctgacgagcatgctgtgatgtggtgacgtgatagtcgctgctatcttccgggctgtctgaggtttcagaccaatttttttcgttttcttcagccatacggcgtgcttcttccgctacacggcgcgcttcttcttcaagtttgcggcgtgcttcttcttccgatttgcgcttcaattccgcggcttcgttctcgcgacggatcttttcagcctgggcggttttggtcatttcgtcggtatgttgattgctcactttgtctttttccgcagcttcacgtttcgctttatcagcgacttcacgtttagcttgttctgcggcctcacgttcagcttttaattgcgcctcgcgtttcgctgcttcttcagcttcacgacgggcctgctcttccgcttcacgctgcgcctgctcttccgcggccaggcgttcagcctcttgcggatcgcgtttcacaaaggtgcgtttcttgcggacttcgatttgtaccgatttactctttccaccggtacctggaatattcaacgtactgcgcgtcttacgctgtaacgtcagcttgtctggcgccgagccgtgttcacggttcaggtgcgtcaacaaagtttgtttctcttgcgaggtcacagaatcatcagccgatttgcggatgcctgcgtcagcaaattgctgtatcaggcgatccacagaggtctgaatctctgaggccagcgctttaatagtcacatctgtcatgctgttccttcctgctacagtttattacgcttcgtcgccgaaccaacaaatgttgcgagcggccatgatgagctcgccagctttctcgtcggtcatcccttcgatatcagccaggtcatcaacgccctgctcggcgagatcttccagcgtacaaacaccacgggcagccagtttgaatgccagggcacgatccagaccttcgagattcaacagatcatcggcaggtttgttatctcccaggctttcttcctgagccagcgccagcgtagtcagtgcgtttttcgcacgctcacgaagtgcttcaacggtggcttcatccagaccgtcgatttccagcagttctttcatcggcacataggccagctcttccagcgaggagaagccttcttcaaccagcactgtcgcgaaatcttcatcaatatcaagatatttggtgaaggtatcgatagcggcatgcgcttccgcctggtgcttagcctgcagatcgtcaacggtcatgacgttgagttcccagccgctgagctgtgaagccaggcggacgttctgaccgttacggccgatcgcctgcgccaggttgcccgcttctaccgcgatatccatggtgtgtttatcttcatccaccacgatggacgcgacgtctgccggcgccatagcgttaatcacgaactgcgccgggttatcatcccacaggacgatatcgatgcgttcaccacccagctcagtcgacacggcctgcacacgcgcaccgcgcataccgacgcaagcgccaaccgggtcgatgcgcttgtcgttggttttcaccgcgattttggcacgagagcccggatcgcgagccgccgctttgatctccagcacttcttcaccgatttccggcacttcgatgcggaacagttcgatcagcatctcaggtttggaacgggtgacgaacagctgggcgccacgcgcttccggacggacagcgtacagtacgccgcgaatgcggtcgcccggacggaagttttcacgcggcagcatatcttcacgcaggatcacggcttcagcgttgttacccagatccagtgtgatattgtcgcggttcacttttttcaccacgccggtgatgatctcaccttcgtgctcgcggaactgatcgaccaccatcgcgcgctcggcttcgcggactttctgcacgataacctgcttagcggtctgggtggtgatacggtcgaaggtaacagattcgatctgatcttcgacatagtcgccgacgttcatgctttcatcttcgaaacgcgctgcttccagcgtgatctcgcgcgtcggctgggtgacttcttctacaaccagccaacgacggaaggtatcgaaatcgccgctcttgcggtcgatttcaacgcgaacgtcgatctcttgttcgtattttttcttggtggccgttgccagcgcgctttccagcgcttcgaaaattttctcacgcggcagcgctttttcgttggaaacggcttcaacaacagccaaaatttctttgttcatcggggcctttcacctcaatccagactgttaaaagtggggaaccaggttcgccttctggatgttactcagcgcgaacacttcatctttgccttcgacggttaccgtgatcatctcaccgtctaccgctttgataatgccctgccatttgcggcggttctgaaccgccatgcgcagcaccagcgcaacttcttcgccggtgaaacgttgatagtgttcggcggtgaacatcggacggtcaagaccaggcgaagagacttccaggttgtaagcgacagtgatcgggtcttcgacatccatgacggcgcttacctggtggctcacatcagcacaatcatcaacgttgatgccatcttcactatcaatatagatgcgcagtgtggatgtgcgaccgcgaataaattcgatgccgaccagctcaaagccaagcgcttcaaccggcgcagtgagcatctctgtcaatttttgctctaatgtggacaaacccacccccaagacataaaaaaagggcgtatagcccagttattctgaagtcagataacaaaaaaccccgataaatcggggctttagataactgaaccctgagatcgccatggcgatctggaacaccttccgcaagaattctttcaaattcggctacgaaggacacctagtcctcacagtatatttgaaaaagtacttaatgggaaagtggttgcgggggccggatttgaaccgacgaccttcgggttatgagcccgacgagctaccaggctgctccaccccgcgcctgaaacgtggcatattttactctttatgagcaaaagacgcaaatactgctgggatttggtaccgaagacgggacataaaatcgagatgaattgtaacggcgattagtatattttgtcaacatgctttttagcgtccccgattgccgtttgtgctggtatttcaggcttttttagcaaaaagatgatgaagcacttcctgtcgccagtaaaagatggttaaatgaatactcacaattaatgcataaaaatgcagttaaggttgttgggtcgaactcaccacagtctatcgagcagggttttattttatgacgacgattctcaagcatctcccggttggtcaacgtattggtatcgctttctctggtggactggataccagcgccgcgctgttatggatgcgcaaaaaaggcgccgtgccttatgcatataccgctaacctgggtcaaccggacgaagacgactacgatgctatcccgcgccgcgcgaaagagtacggcgctgaaggcgcccgtctgatcgactgccgcaaacagctggtcgcagaagggatcgccgcgattcagtgtggcgctttccataacaccaccggtgggttgacctacttcaacaccacgccgctaggccgcgcggtcaccggcaccatgctggtggcggcgatgaaagaagacggcgttaacatttggggcgatggcagcacctataaaggcaacgatatcgaacgtttctatcgttacggcctgctgaccaacgctgaactgcagatttacaaaccgtggctggacagcgactttatcaatgagctcggcggtcgtcacgaaatgtccgaatttatgatcgcctgtggctttgattacaagatgtcggtcgagaaagcctactccaccgactccaatatgctcggcgcgacccatgaagcgaaagatctcgaattcctgaactccagcgtcaagatcgtcaacccgattatgggcgtgaagttctgggacgaaaacgtgaagatccctgcggaagaggtcaccgtacgctttgagcagggccatccggtggcgctgaatggtaaaacctttgccgatgacgtcgagatgatgctggaagccaaccgcatcggcggtcgtcacggcctgggcatgagcgaccagattgaaaaccggattatcgaagcgaaaagccgcggcatttatgaagctccggggatggcgctgctgcatattgcctacgagcgtttgctgaccggtatccataacgaagatacgattgagcaatatcacgcccacggtcgccagttgggccgcctgctgtatcagggccgctggtttgattcccaggcgctgatgctgcgtgattcgctgcagcgctgggtcgccagccagatcaccggcgaagtcaccctcgaactgcgtcgcggtaacgactactcgatcctcaatacggtatcagacaacctgacctataaagcggagcgtctgaccatggaaaaaggcgattccatgtttactgccgaagaccgtatcggccagctgaccatgcgtaatctggacatcaccgatacccgcgagaagctgttcggctatgcccagtctggcctgctgagcgcctcctcggcaaccggtttaccgcaggttgaaaatctggaaaacaaaggcaaataatcgcctgacaatgttgctttccgccggcggatcaccgccggctttttattttgaatgacccaccaacttaaaaaaaatgccatgacgcattttttccttatcgccagaccagcaaaactgttgactataatagcctcaattgattaattcatatctggtgatacacatcatgaatattaaaccgccgatcaggccgcaaaagaccattgaccgactgatcgatgtacttgagccacacgcgacacccgttaacgcgatcgccagaaaaagactgacatgggaatataaaggcaaaacccagctctttatttttaaaaaaggcgagctgtcgattattcgtaattccgacaggctactgatggtgaccgtctatgagccgcatcttttcggcgtggcggaaatgctgcagcccagccgcagccacagcctgcgagccgaggtatcatgcgaactgctacggatcgaccacgacctggcttcggcgctttttcgccagcataacctgtgggaagaggtgaccagcctgttggcttatcatacctcgtatatggtgtatcgtgacgatctggtcctgcagcagcgtacctattcggtcatccgtaaccatctgctggagatgatgctattaagcgaagagacccgacagcgggtatctattcttgagtatattcaggacaggacccttctgtcgcgtagcagtattctcaatgtattgtcagcattaaagaaaggcggttatattacctttgcccgcggcggttatttacaaaatatcgtctcacttcctgaaaaattctgacccgcactcctcctatcatttattgttatttgctgcagcggggaagatgtttaaatttaaaccaataaccgttaccgctaaaagaacaaaaattttatgctaagcgcctgggtttcccggaagacaatctattcctgagttcgccagcagacgaccacaaacggcgttaaccgccgggtctgcaccggctcaggatatgccagcggaaatcggccagacgtgtgcggcggtagcgagagttgccccctcgcctgccgcgaccataacaatgagatgcacgaacccgttaattatgcccgaacgcccatatcgggcttttttttatctgaaggaatttaataatgaagtctattgctgcaaaaatggttgccgtaacgatcgctttgggagccagcagcgctgcctgcgcagccgttaacctgcatggagaagctggcgccgagtttaccaatctgtccgccagctttggcgccggggaaccgggtatgacgttcagttctcagtgggcccatagcgacaacgacggagatagtgtaggactgggaatgggttataactttaaccttggcccttttctgatgaccctgggcggtaaggcggtctatctgaatccaaaagatggtgatgaaggttacgccatcgccgccggtggtggcgctgaactcccccttggtcagtatttcacgcttttcggcgagggctattactcaccggactcaatgtccagcggcgttgaggattatgtggaggccaatgccggggtacgccttaacgtgctcccatctctgaatatcgaagctggctatcgctatattgatatggcagggaaagatggcaatcgcgataacacgctggccgacggcgcttacgccggggttaacttccgcttttaactcttcacagggattgccggtcagcagtccctgtttcattctcagctggtcagcggcacgcttttcagtacgcggttgatctcttgtaggcccgcaacattattctctttgcggtaaacctcattcatggacgccatctgctccaggcgggtcagggcgccatacactttatacgcctcgctgtgtctgtcgaacacatcgcggcgctccacgtcctgcagataatgacttttcaacgaatggttaaggcgactaatcagtgccgtattgtcctggaaatagcgcctcactgcctgggcatgattcgctgtagtcccagactcactgggcgataccggtacggttagcgcattaatcgtctccaccgtttgggagggcgatgttgaactgcacccagctaaaccgagcacgccggcgacgataagcaacccgatcttgttcattgtgtcacttcacctctgttaatttgacgaggcgactttaacgacagtaaaaggaggcaaccagcgaagagatgtttataaataaatgtccagcggggacaaaaacaaaaaaagacgcttttcagcgtcttttttctggaatattggtaccgaggatgggactcgaacccacaagcccgttagggcactaccacctcaaggtagcgtgtctaccaattccaccacctcggtacagaatacttagtgcgggatatcgctggtcggctgagccggcgcagttggctgagtttgctccgttttcggcgcgctcagattatcccactcacttcctttactggtcttgttgctgttgatattacccagcgccagactgatgatgaagaacagcgcagccaggatgccggtcatacgggtcataaagttgccagaaccgctggacccaaacagtgtgccggaagcgcctgcaccgaaggaggctcccatatcagcgcctttaccttgctgcagcataaccagacctacaaggccaatcgctacaataaggaaaacaaccaaaagagcttcgtacataatcaacctgttccttgcggattcgccgcatactaagtgcttcgaccaataaagcgggacgttttaacgtttcccactgaagcgggtgtgaatactaaccaaagcgaatgaccttcgcaagggcaatttcgacacattgtatcaactgcagaaaaaaacagcaaaaagccaattttcgatcataaaaaaggcggcaagcgccgcctttttaaccacttagccggcaaagctaaacgctttttaccgcctcagcgatgcggtgcgcaaactcgtgcacctgatcttcatgctcgccttccaccatcacgcggatcagcggctccgtacccgatttacgcagcaggacacggccgcgttttcctaacgccgcctccacttccgcggtcaccgctttgacgtgctcattctccagcgggttaccgctgccctcggtaaagcggacattcaccagcagctgagggaacattttcatcccgctgcacaggtcatgcaggctcatgtggttgcggaccatcgccgcgaccacctgcaggctggcaacaatgccatcgccggtggtggttttatccagcaggatcacatggccggagttttccgcaccgatgcgccagcctttttcctgaagcatctccagtacatagcggtcaccgaccttcgcgcgggcaaacgggatgcctaactgcttgagcgccagctccagccccatattactcatcagcgtgccgacggcgccgccgcgcagctgcccctgacgcaatccttcccgggctatgatatagaggatctggtcgccatcgactttattgccttcgtggtcaaccataatcacccgatcgccatcgccgtcgtaggcaatacccagatcggctttttccgccagcacgcgcgcctgcagcgcccgcacgtcagtggcgccgacctcttcgttgatgttgagaccgtctggctcgcagcccatcgcgataacctgggctcccagctcgcggaagacattaggggcgatgtgataggtcgcgccgtgcgcgcaatccaccaccactttcagcgttcccaggctcagttcgttgggaaaggtacccttacaaaattcaatgtagcgccccgccgcatcgacgatacggctggctttgcccagctcagccgaatccacgcaggtgagctctttctccatttcggcttcaatcgcctcttcgacatcatccggcagcttggtgccctcaatggagaagaatttaatgccgttgtcgtagaaagggttatgtgaagcagagataacaatccccgcctcggcgcggaaggcgcgcgtcaggtaggcaatggccggtgtcggcataggcccggtgaacgacgcagagagccccgctgctgccagtccagcttccagcgccgattccagcatatagcccgaaatacgggtatccttgccgatgataattttacgcgaaccgtgacgcgctagcactttgcccgccgcccagcccagcttgagcacaaactccggagtgatcggcgcatcgccgacgcggccacgaataccatcggtgccaaaatacttgcggttactcataacgtttttttcccttagcggcgagggtggcttccaccacgcgcagcgcttctaccgtttctttgacatcatggacgcggataatctgcgcgccctgcattgctgcaatgacggcacacgccaggctgccgttcagccgctccgacggcccgacgttcagcaactgacctaccatcgacttacgtgacataccgaccagcagcggcagaccaaagtgatgaaactccccaagcctggccaacagttggtaattgtgggagagatttttaccgaaaccgaatcccgggtcgagcagcaatttttcttttgcgatccctgcctgttcgcagcgcacaatgtgctcattaaaaaaacgctcaacatcggcgaagacgtcctcatacttcggcgcctcctgcatggtttttggttgtccctgcatatgcatcagacacactggcagtccggtttccgcggcggcctgcagcgcgccgggctcggtcagcgaacgaatatcgttgatgatatgcgccccggccctggccgattggcgaataacctccgccttggaggtatccactgagatccatacctcaaagcgctgggcaatggcttcaaccaccggtatcacccgcgcaagctcctcttccacactaacctcagccgcccctggccgcgtcgattcaccgccgatatcaatgatggtcgcgccggcgttgatcatcagattggcatgcttcaccgcctcaatcagcgaattatgggcgccgccatcggagaaggagtcaggcgtcacatttagaatacccatcacgtgggggtgagagagatcgagggttgagccctgggctacaagtttcatcacaaaatccctgagactgaagaggttaaaaaagaaaaaccccggagcggacgcccggggttttaaggttaaacaagcatcaacagcggtagcttacttgtcgcccagctgctctgacatggtgttgcccgggttcggcgtacgcggttcatcaaccggacgcggcgcacgaggcgtgccattgttgtcagagttgttagaagaacctggttcttcccaacccgctggcggacgaacttcgcgacgagccatcaggtcgtcaatctgcggcgcatcgatggtctcatacttcatgagcgcatctttcatcgcgtgcagaatgtccatgttgtcgttcagcagctggcgagcacgaccgtagttacgctcaatcagcgatttcacttcctggtcgatgatacgcgcggtttcatcggacatatgcttcgctttcgcgacgctacggccgaggaagacttcaccctcttcttccgcatacagcagcggaccgagtttgtcggagaagccccactgggtcaccatgttacgcgccaggttcgtcgccactttaatatcgttggacgcaccggtagaaacatgttccggaccgtagataatctcttccgccagacgaccgccgtacagggtggagatctggctttccagtttctgacggctggcgctgattgcatcgccttccggcaggaagaaggtcacacccagcgcacgaccgcgcgggataatcgtcactttgtgcaccggatcgtgctccggcaccaggcgaccaataatcgcgtggcccgcttcatgataagcagtagactctttctgcgcttccgtcatcaccatggagcgacgttccgcacccatcatgattttgtctttcgctttctcgaactcaaccatcgacacaacgcgtttgttgccgcgggcagcaaacagcgccgcttcgttgaccaggttggccagatccgcaccggagaagcccggggtaccgcgcgcaatgattgccgcatcgatatccggcgccagcggaacgcgacgcatatgcactttcaggatctgctcacgaccgcgaacatccggcaggccaaccaccacctggcggtcaaaacggcccggacgcaacagcgcggggtcaagaacgtccggacggttagtcgccgcgataacgatgataccttcgttaccttcgaagccgtccatctcaaccagcatctggttcagggtctgctcacgttcatcgtgaccaccgcccaggcctgcgccacgctggcggccgacggcgtcgatttcatcgatgaagatgatgcaaggcgcggctttcttagcctgttcgaacatgtcacgcacacgagaagcgcccacaccgacgaacatttcgacgaagtcagaaccggaaatggtaaagaacggtaccttcgcttcaccagcgatcgctttcgccagcagcgttttaccggtacccggagggccgaccatcaggacgcctttcgggattttaccgcccagtttctggaagcggctcggctcacgcaggtattctaccagctcgccgacttcctctttcgcttcgtcacacccggcaacgtctgcaaaagtggttttgatctggtcttccgtcaacatacgggctttgcttttgccgaaggacatcgcgcccttcccgccgccgccctgcatttgccgcataaagaagatccagacgccgatcagcagcagcattgggaaccaggagatgaagatggaagccagcaggctcggctcttctggtggttcgccaacaactttgacgtttttagtcaacaggttatcgagcagcttcggatcgttaaccggaatgtaagtcgtgtaacggttactatctttcttggtaacgttgatctcacgtccgttgatacgcgcttcgcgaacctggtcctgattgacctcttgcaggaaggtagaataatccaccttgcggccattcgactcgctgggcccaaagctctggaatactgacatcagcacaacggcaatgaccagccagagtattaggtttttcgccatgtcactcaagggattaacctcttattacaactgtgttaaaaacagcgtcaggatactctatatccagtttctttcaaactttcgtttgaaatctgccggttatggtttacgcccggtcgctacaatatacacttcacgcgaacgagcgcgggaagagtccggcttacgaactttgaccttcgtaaacagggagcgaatttctcgaagatactcatcgaagccttcgccctggaacaccttcactacaaaactaccacctggcgctaatacatcacgagacatttcaagcgccagttctaccagatacatagcccggggaatatccaccgccggtgttccgcacatattcggcgccatatcggacatgacaacttggactttactgtcgcccactcgctcaagtaacgctttcaggactaattcatcacgaaaatcgccctgaaggaagtccacaccaacgattggatccattggtaaaagatcgcaagcgatgatgcggccgctgttgccgatctgcgtgaccgcatactgcgaccagccaccgggagcagcaccgaggtcgactaccgtcatccccggcttaaaaattttgtcactttgctgtatttcatcaagtttaaaccaggcacgggaacgtaacccctttttctgtgcctgttgaacatatttatcgctaaagtgttcctgaagccagcggcttgagctggcagaacgctttttacctgtcatttaacattcccgttcgggttcatcgtactttactgcgtaaaaatcgacgcggtagtttggcgatatatgggagatggcggtagaatgacccgttttcaatcccaacgtaagcaaaaaaatacgatgaatctgagtactaaacaaaaacagcacctgaaaggtctggcacatccgctcaagccggtagttatgcttggcaacaatggtttgaccgaaggggtactggccgagatcgaacaagcgttagggcaccatgaactcatcaaggtgaagatcgcctcagaagatcgcgaaacaaaagccttgatcgtggaagccatcgtacgcgaaaccggcgcctgtaacgtacaggtcatcggtaaaacgctggttctgtaccgcccaacgccagagcgtaaaatctcgctgccacgctaagaatatcctgaatctcgacacaactttgtgtaaaacgagggatttctgcggccaggcgagcaaaatgccatgctcctgacgttgataaaaggccgctatgcggcctttttcctttctttacaatctataaacatcgtagcgggaaatacgccttacaggtattcaaccttggtaatttcgtattccacttccccacccggggtacggatagtcacgacgtcatcctgctctttgccgatcagaccgcgggcgatcggcgagttcacggagatcagattctgcttaaaatcagcttcgtcatcgcccacgatgcggtaggtctgttcctcgtcggtatcgaggttcagcacgctgacggtagaaccaaaaatcacccggccgttgttcggcattttggtgatatcgataacctgcgcgttagacagtttcgcttcgatatccttgatacgcccctcgcagaaaccctgctgctcacgcgcggcgtgatactcggcattctctttcagatcgccgtgttcacgggcctcagcaatagcggcaatgatttcaggacgacgcacagacttcagataatccagttcttcgcgcagtttttcagcgccacgtaaggtcatcggaatcgcttgcattagttatacctctttatcattccttcagggaacggatagctccgctccgccacctgtcctgcccacgggcaggacacgagcaaaaagaaaccgacccgggaaacactccccaggtcagcagcaatttttcatttgatgggtattttaccccgaagttcattatgggtcatcgtttactttactgggcgttgcaccgtagtatgacggcctggcttcaggttgttagcgcgagattatgcgatttcccagatttatcatcggattgaccgccggtatagcgcttagcgctcaggcggcgaatattgacgagtacatcaaccagcttcccgccggtgcgaaccttgcctttatggcgcaaaaggtcggcgcatcgacgccggaaatcgactatcacagccagcaaatggcgctcccggccagtacgcaaaaggtcatcaccgcgctggcggcgctgctgcaactggggcccgattttcgctttaccaccacgctggaaaccaaaggttcccttgacggcggcgtgctgaaaggcgacctgattgcacgcttcggcggcgatccgacgcttaaacggcaggatattcgcaatatggtggcgacgctgaaaaaagccggcgtgcagcgtatcgaaggcaatgtgctcatcgatacgtcggtcttcgccagccatgacaaagcgcccggctggccgtggaacgacctgacgcagtgcttcagcgccccgccggcggcggcgattgtcgaccgtaactgcttctctgtctcgctgtatagcgcgcagaaaccgggcgatgtcgccttcattcgcgttgcatcctattatccggtcaccatgttcagccaggtgcgaacgctggcgcgtggctcatcggaagcgcagtattgcgagctcgacgtggtgccgggcgatctcaatcgctatactctcaccggctgcctgccgcagcgtagcgagccgctgcctctggccttcgccattcaggatggcgccagctacgccggagcgatcctcaaagcggagctggcccaggcggggatcacctacagcggcacgctgctgcgccagacgctggccaatgagcccggcaccgtgctggcaaccagccagtcggctccgctgcacgatctgctgcggatcatgctgaagaagtcagacaacatgattgccgacaccgtctttcgcaccatcggccacgcccggttcggcgtacctggcacctggcgggcgggctccgatgccgtacggcagatcctgcgtcaacaggctggggtcgatctcggcaacactatcatcgccgacggctctggcctgtcgcgccacaacctgatcgccccggcgaccatgatgcaggtgctgcagtatatcgcccagcacgataccgagctcaacttcatctccatgctgccgctggcgggccatgacggatcgctgcagtatcgcgccggtcttcatcaggcgggcgtcgatggtaaagtctcggcgaaaaccgggtcgctccagggggtttataacctcgcaggcttcatcactaccgccagcggacaaaagatggccttcgtgcaatatctctccggatacgccgtggagccagctgatcagcgcaatcgccgcatcccactggtccgctttgaaagccgcttgtataaagatttgtaccagaacaattaaaacaaaagggccgcatcagatgcggccctttttgatccagagaagtcaggattagcgtttgtagatgaattcgacgccttcttcgtcgtcctcatcccagtcgtcatcccagtcttcgtcatcttctgcttcggcttcggcctcttcaagctgctgacggtgatagtcgtcccacataaactcgactttctccggcttctgctcttcttccgcctgcacgatcgggttttcgatgatgaaggtcatcacgtcccagcacagctctttcacgccctgctggctggccgcggagatcaggtagaatttctcttcccaacccagcgcttcggcaatcgctttggctttggcttcggcttcggccttgtccatcaggtcaatcttgttgaaaactaaccagcgtggtttggaggctagcttctcgctgtatttctccagctcgccgatgataatgcgcgcattctcaaccggatcggagccgtcgatcggatcgatatcgatgaggtgcagcagtacgcggcagcgctcgaggtgcttgaggaagcggataccgaggcctgccccttccgctgcgccttcaatcagccccgggatatcggcaactacgaagctcttttcattgtccatacgcaccacgcccaggcttggcaccagggtggtaaacggatagtcagccactttcggcttggcggcggagaccgcacggatgaaggtggatttgccggcgttcggcatgcccagcatcccgacatcggccaacagcatcagctccagctgcaggtcgcgtttatcacccggggtacccatggttttctgacgcggcgtacggttaacggacgatttgaaacgggtgttgcccaaaccgtgccagccgcctttcgccaccatcagacgctgaccgtgtttggtcatatcgcccatggtctcgccggtgccctgatcgataacccgggtgccgaccggcacttttaccgtcacgtctttaccgcgcttaccggtacagtcgcggctttgaccattctgcccacgttcggcgcggaacgatttttcaaaacggtagtcgatcagggtgttcaggttctcgtccgcttccagccagacatcgccgccatcgccgccatcgccgccatccggaccgcctttcggaatatacttttcgcggcggaagcttacgcaaccattgccgccgtcacctgctacgaccaggatcgttgcttcatctacaaacttcattttactctccgtaaatcattcgcctgagcggggcagcggtactaccgcctctcgcttacgccaacgtccccaaagacgatgaccgatggcggaatacatcgcgcccgcaaccacgacaaacgcaccgagataaccaatcaggtttaacatcggtctggcgaaaacatcgggccaggccattgataataaatcagaaaacagtagcgtaaacagtggcgtcaaggtgattaacgcgctgacctgcgccgcctgccagcgcgccatggcttccgccagcgccccgtagccgaccagggtattcagcccgcaaaaaatcaggcatgccagttgccagctgcttaaccgggaaatcactccgggctcagcaagtggcagtaatgcaatcgtacacaaagtgtacagcaaaaatagtatctgctgtgatgccagacggcgcaataacaccttttgcgcgacgccgtagcttacccacaccgtagcggcagcaacgccgaaaattaccccccacgtgtagtccgtcaggcgggtaaagatttcaatcagactggtattgaagaacatcaccagcccgctgagcagcatcaacgcgcccaccacctgggtgccgcgcatgcgctctttcagaattacgacgctagccaccatcatccccaccggcgatagctggccgatgacctgagaagccgtggggctgaggtattgcagggaagaactaaacaggatgaagttaccgaacagaccgccggtggcaatcgctaataacaccagccagcgcggcttgcgaaaaattcgcatcggcggcagtttgcctttgatcgcgaggatcgcgccaagcccaatgctggccatcagaaagcgataaaagaccaccgtaggcggcgccatcacctcgagaacctgtttcattgcaatcggcaacgctccccaacacattgcggtggtaagcgccagaataatgccaatcccagcctgctgcttcatgcctgtttccctgcaaaaattttccggtagacgaatgtaaaaagccccgcaacgtgttgcggggctttcatccgttaccgggacgcgaaaaacttattcagcaacgatgctgatgaatttacggtttttcgggcctttaacttcgaacttgactttaccgtcagtcaaagcgaacagagtgtggtcacggccgcaaccaacgttggtaccagcgtggaatttagtaccacgttgacgaacgatgatgctacctgccagaactgcttcaccgccgaaacgttttacgcccagacgtttagcttctgaatcgcgaccgttacgagtcgagccgccagcctttttatgtgccatttaaatctactcctcaggtcttaggcgctgatgccagtgattttcacatcagtgaaccactgacgatggccctgctgcttacgatagtgtttacgacgacgaaacttaacgattttaactttctcgccacgaccgtgagcaacaacttcagctttgattacgccgccctcaacgaaaggaacgccgatcttgatttcttcaccgtttgcgatcatcagcacttcagcgaattcaacagcttcgccagttgcgatgtccagcttttccaggcgaacggtctgaccttcgcttactcggtgttgtttaccaccactttggaaaaccgcgtacatataaaactccgcttccgcgcacctctttatgtgattcagagtgcgctataaatattcacaatagggcgcgaatattacgcaaaacgcgagcctttgacaagagcgattagcgatcaatgcagaaaaaaaacacaactttcacgacaacgtttatctacggcaatttttcagtacaatcatatcttcttttaattctgtcttaatccttctgtgatcccacctggattcatggtaacaggacatttggcccggcttttgcgatgaatttagaaaaaatcaatgagttaaccgcgcaagatatggcgggtgtcaatgcgacgattcttgagcaactcaactccgatgttcagcttatcaatcagttaggctattacatcgtcagcggcggcggcaaacgcattcgcccgatgattgctgtgctcgccgcacgcgcggtgggctatcaggggagcgcgcatgtcaccattgccgcgctgattgaatttattcataccgccaccctgctgcatgacgacgtcgtcgatgagtctgatatgcgtcgcggcaaagccacggccaatgcggcgtttggcaatgccgccagcgtgctggtcggcgattttatctatacccgcgcctttcagatgatgacccagctgggctcgctgaagatccttgaggtcatgtcggaagcggtgaacgtcattgccgaaggcgaagtgctgcagctgatgaacgtcaatgacccggatatcaccgaagagaactacatgcgcgttatctacagcaagacggcgcgtctgtttgaagctgcctcgcagtgtgcgggactgctggccgactgcactgcggaagaagagcgcgcgttgcaggattatggccgctatctcggcaccgctttccagctaatcgacgatttactcgattatagctctgacggcgagcggctcggtaaaaacgtcggtgacgacctgaacgaaggtaaacccacgctaccgctgctgcacgccatgcaccatggcacacccgatcaatcagcgatgatccgcggtgcgatcgagcaaggcaacggccgccatctactggatgctgtgctggaaacgatggcgacctgcggttcgctggaatggacgcagaagcgtgccgaagaagaagctgacaaagccattgccgcgctgcagatcctcccggacacgccctggcgtgaagccttgattgggctggcgcacattgcagtccagcgcgatcattaatcccccctcctttcccgcgcgacgcgcgggaaagttccagtaaaatgccatttctctccctaaaattccgaatatcttgatagattctgaatattccggcgctttaacagaacttgttagaaccctacatagtacgcgggtatagtgtctctatcgcccatgtgggacgatctggacctttaacaccaggagaatttatggataagttcatcgactggcatcccgcagatattgttgcgggattacgtaaacggggaacatcgctggcggcagagtcgcgacggcacggactaagttcttcaacgctggcgaacgccctgacccgcccctggccgaaaggcgaattgattatcgccacagcgctggaaacgcagccgtgggtcatctggccgtcacgctaccacgacccggtgactcatgagtttatcgacagaacgcagatgatgcgtcagaagaagatcgacaagtgatgtgattgctcgacagcgccccggaacaacgtcccggggcgctgtcaggacgcggttactcgcccttcacgcgttgaatattggcgcccagcgcctgcagtttatcttcgatacgctcatagccgcgatcgatatgatagatgcgatcgacgatggtggtcccttcagcgatacagccggccagcaccaggctcgccgacgcgcgcaaatcggtcgccatcacctgcgcgccagaaagctgcttcacgccgtgacagatagcggtattgctctcgatctccgcgtgcgcgcccatacggatcagctccggaatgtgcatgaagcggttttcaaagatcgtttcggtgatcacgccggtcccttccgctaccaggttaagcagcgtgaactgggcctgcatatcggtcgggaagcccgggtgcggcgcggtacgcacgttgaccgctttcggacggttgccgtgcatatcgaggctgatccagtcttcgcccgtttcgatgtcagccccggcgtcgcgcagcttcgccagtacggcatccagggtatccggctgcgcgttacggcagaggatcttgccgccggaaatcgccgcggccaccaggaaagtcccggtttcaatacggtcaggcagcacacggtagacgccgccgcccaggcgctgcacgccttcgatggtaatgcgatcgctaccctggcctgtgatttttgcgcccagcgcgttcaggaagttggcggtatcgacaatctccggctcgcgagcggcgttttcaataatcgtcgttccctccgcaagcgtcgctgcgctcatgatggttacggtggcgccgacgctcaccttatccatcacaatatgcgcgcctttcaggcgaccgctgaccgaggctttgacataaccttcttccagtttgatctcggcgcccagctgctccagaccgctaatatgcagatcgaccggacgcgcgccgatagcgcagccgccaggcagagaaacttgcccctgaccgaaacgcgccaccaacgggcccagcgcccagatagaggcgcgcatggttttcaccagatcgtacggagcacagaatacatcgaccgggccggcgtcaatccataccgaaccattgcgctcgaccttcgcgcccagctggctcagcagcttcatggtggtatcgatgtctttcagcttaggtacgttttggatctctaccggctcttcggcaagcagcgcggaaaagaggattggcagggcggcgttttttgccccggagatggtgacttcaccctgaaggcgagtcggcccctgaacacggaatttatccattgattctgttctctattaaaaattcacatacgctgcaggggatcccccacagcttagaagccattgagtttgcggtctcgcgcccactcctgcggagtaaaggccttgatcgacagcgcatggatgcggttgtcggcaatatattccatcagcggcgcgtagacgctctgctgctttttcacccgactcatgccatcgaacatctcacccacagcaataacctgaaagtggctgccatcgccagagacgtggacttcctggagggggagtgcgttcatcagcacggtctgaatttcatgattttccatgggctcaaatttatctgatagtgaaaacagcccaacatcttagaggaaagtggcgcggtcttaaacaagcaaaaagccccggcgaaaagattgccagggctttcggaatagcttcagtgctaaggcactgaaaagattatgagatcagatcggcaggcaggttgtaaagaccgatcagcgtttgcaggttttcgctcttgccgaccagctgcgcttcccggccctgacggcgaatcagcgccataaaatgcactaacagcgccaggcccgcggtgtccacgcgcgtggtctgactgagatcgatgatcgccgttcccgccgtcgcctgggcgcgcgcctcccagagcgggaccagcagatcctgatccagctccccgtgcagcgccagcgtctcgccctcgcgagtccagctcagctgcccgctcattattttttctgttccagggtgatcggctgcgcagagatcgctttcagctgcgcggtcaggccatcaacgcccttggtgcgcagcagatcgctccactcattctgtttggtggtgatcatgctcaccccttccgcgatcatatcgtaggcctgccagttgccggtctgggtatttttacgccactggaagtcaagacgtaccggcggacgaccgttcgggtcgatgatagtgacgcggatcggaacgatggttgcgctgcccagcggctgctccggagcaatctggtaagtctgcccatggtacatcgccagcgcctgaccgtaggcctgcttcaggtattcacggaaggcgacaaaataggcctcacgctgcgcaggggtcgcttctttgtaatagcggcccagcaccagcgcgccggcatatttcacctgtacatacggcaataactcctggtcgacgatgtcgcgcagatagttaggattagctttaatcttcggctgttcattcttcaggcgatcgaaggttttctgcgccgcttcattcatcagcttatacggattggactgatctgcggcctggacggcggtcagcggggcaatcaccagcatggcgaccatgagtaagcgtttaaacatatcgtatttctcctgaaattaatgcgtcgtgccggctgccggcgtcgcgtcagtatgaccttctgcctcggccttatcattgccagaattctgattgtcgccgcccttactgttataaaggaactgaccaatcagatcttccagcaccatggcggacttagtgtcctggatagtgccgccgtctttaaggatagtcgtcccgaggtccgggtcttcaaaaccgacgttcagcgccaggtactgctcgcccagcaggccagaggtgcggatcgccaacgaactggtatccgggatatggttgtagcgctcatcgatatcgagctccacgcgtggcagataggttttcggatcgagcgtaatgtccgctacccgccccactaccacgccgccgatgcgcaccggcgagcgcgccttcaggccgccgatgttatcgaaagtcgcataaaggcgataagtcggctcggtgcgtagcgaggtgacgttcgccgccttcaggcagacaaacagcgccgccagcagcgccaccagtaagaacacccctacccagatttcagtttttttcgtttgcatgaactcaattcccaaacatcagcgcagtcagcacaaaatccagccccagaaccgccagcgacgcatgcaccacggtacgcgttgtcgcccggctaatcccggcggaagtggggatagcgtcataaccattaaataacgcaatccaggttaccgtaatagcgaacaccagactcttaatcaggcagttcaccagatccattcgccagtcgacggcattttgcatcgcggtccagaaaaaaccaccgtcaatgcctttccagctcacacccaccagcgcaccgccccagatccctaccgcgacgaagataatcgtcagcagcggcagcgaaatgacaccggcccagaagcgtggggaaatgacgcgacgcagcggatccaccgccatcatctccatactggagagctgttccgtggcccgcatcaggccaatctcggcggtcagcgccgacccggcgcggccggcaaacagcagcgcggcgaccaccggccccagctcacgcagcagcgacagcgccaccagcatgccaagactggtctctgcgctgtaggtggttaacaccagatacccctgcagcccgagcaccataccgataaacaagcccgatacaatgataatcagcatcgacaggacgccgacgttatagagttgacgaaccagcagcggcgcgtgcttgcgaaactctggtttgccgacaacggcgttgaaaagcattaatccggcgcgtccaaacgtcgcggtggttttaataccgcgatgacctagcgcggccagcgcattaaacagcatgagtcgctcaactccctatgcctaataaatcatggtgatagtcgccagcaggataacggaacggcaccggaccgtcggcaataccatcaatgaactgacgaacccgaggatcggtattctcccgtagcgactgggcgctaccgtgggcgacaatctttttatccgccacgatatacgcgtagtccgcaatactaagcacctcgggcacatcgtgcgaaaccacgatgcaagtgacacccagcgtgctgttgagttcagaaatcagcttcaccagcacgcccatagtgatgggatcctgcccgacgaacggttcgtcgaacataatcagatccggctccagggcaatggctctcgccagggcggcgcggcgcgccatcccaccggaaagctcagaaggcattaacttcgccgcaccgcgtagccccaccgcttccagcttcatcatcaccgtcgtatgcagcagcgcaggcggcaaatgcgtatgttcgcgcagcggataggcaacgttgtcaaagacattgagatcggtgaacagcgcgccggactggaacagcatgctcatccgcttacgcaccgtataaagacgcgaacgcgtcatctgcggcacgttctcgccatcaaacaggatctctcccctgtccggcgggatctggccgccgatcaggcgtaacagggtagtcttgccgatccccgaaggtcccatgatcgcagtaattttaccgcgcggcaccgacagcgagatgtcgtcgaagatcacacgatcgccgcgtgaaaagcggataccgcgcacttcaactaaattcgcctgagtttggctcataaaatcatccttactaaacacctgacgggcaagcatggccctttcttgcgccacaatcacaacatttttacagaatcttacctgcacaggttagcgaaagctggcatttgttttacttttggcacacataaagtcaaaattaagaattcgttacgctgcgtagggataacccagcgaggcgacgattatacctgaagaaaggactttagatgctcttagcgacggctctgttaattattggtttattgctggttgtctacagcgccgatcgtctggtctatgccgcctccatcctgtgtcgtatgttggcgatcccgccgctgatcatcggcatgacagtggtcagtatcggcaccagcctgcctgagatcatggtcgccaccgcggcctcgctgcacgggcagaccgatctggcggtcggcaccgcgctcggatctaatatcaccaatatcttattgatcctcggtctcgccgccttactcaggccatttaccgtgcattctgatattctgcgccgcgaattaccgctaatgttgctggtcagcgtgctggcgggactggtgctctacgatggacaactgacccgtctcgacgggctatttttactggcgttagcgcttctgtggctgctgttcaccatcaaaatcgctcgtctggcggagcgccagggaagcgatagcctgacccgcgaacagctggcggagctgccacgcgaagggtcgctgccggtcgccctgctctggttaggggtagcgatgatcgtcatgccgatggcgacccgcatggtggtggataacagtacagtgctggcaaactatttcgccatcagcgaactgaccgtcggcctgacggtggtggcgataggcaccagcctgccggagctggccaccgccatcgccggggcgcggaaaggggaagatgatattgccatcggcaatatcatcggcgccaatatccttaatatcgcactggtgctgggtttaccggcgctgatcgcgccggggagctttgcgaccgaagccttcactcgcgattatggcgtgatgctgctggtcagcctgatcttcgcagtgctgtgctggcgccgtcagcagcagccgggacgactggttggcgcgctgctggtcggcggctttgtggtttggttggcgatgctgttttggacagcaccgctcttcgttgaatgattcgggataacatcatgtcgcaaatagatttgcccacggattttgactttcaacaggcaggccgtcaggtgctggaaattgaacgtgaaggtctggcccagctcgatcaatacataaatgaagactttacccatgcctgcgaaacgattttccgctgcggcgggaaagtcgtggtgatggggatgggcaaatccggccacatcggccgcaaaatggcggcaaccttcgccagtaccggcacctcggcattttttgtccaccccggcgaagcggcgcacggtgatttaggtatggtcaccccgcaggatgtggtaattgcgttgtcgaactccggcgaatcgaatgaaatcctcgcgctgatcccggtcctcaagcgccagcaggtgaagcttatctgtatcaccagccggccggagagcagcatggcgcgcgcggcggatatccatctgtgcgtgaaagtgccgaaggaggcctgcccgttaggactggcgcccacgtcgagcaccaccgccgcgctggtgatgggtgatgccctcgccgtcgccctgctggaagcccgcggctttaccgctgaggatttcgccctgtcgcatccgggcggcgcactcggccgtaagctgttgctgcgggtcaatgatattatgcataccggtgatgaaatcccgcacgtcggcctgcaggcgaccctgcgcgatgcgctgctggaaatcacgcgtaaaaatttaggcatgaccgctatctgcgatgacgatatgaacatcatcggtatctttaccgacggtgacctgcgccgggtcttcgataccggcgttgatatgcgcgatgccagcattgccgacgtcatgacccggggaggtatccgcatccgccccggcactctggcggtggatgcgctaaacctgatgcaatcccgtcatatcacctgcgtgctggttgccgatggcgaccatctgctgggtgtggtacatatgcacgatctgctgcgcgcgggcgtagtgtaagtaaggaaaaaataatgaataatgctgatgctcagttagcgacctgctacgggccggtaagccaggcgtttgtcgatcgcgcggcgaagatccgtctactgatccttgatgtcgacggtgtattatccgacgggcttatctatatgggtaatcacggcgaggagctgaaagcgtttaacgtccgtgatggctatggtatccgctgcgcgctgacctcgggtattgaagtggcgattattaccgggcgaaaagctaaactggtagaagatcgctgtcagacgctgggcatcacgcatttgtaccaggggcagtcggacaagctgctggcgttccgcgatctgacggacaaactgcacgtgcggccggaagaagtcgcctacatcggcgacgatctgattgactggccggtgatggccgaagtgggccttagcgtcgccgtcgccgatgcgcatccgctgctgctaccgcgggcgaattatgtcacgcgaattaacggcggacgcggcgcggtacgcgaagtctgcgatttgttactattggcgcagggcaagttggatgaggccaaagggcaatcaatatgagtaaaaccagacgttgggttatcattttactgtcgctgctcgcgctgatccttatcggcctgaatctggcgaatacggacgacacggcccagccggaggtcaatcctaacgaccctacgtataaaagcgaacataccgacaccgtggtatacagtccggaaggcgccctgagctatcggctgattgccgagcacgtggaatatttttccgatcaggaggtctcctggtttaccaaaccggtgatgaccacctttgatactaacaaggtgcctacctggtcggtcagagcagacaaagcgaagctgacgaatgaccggatgctctatctttacgggcacgttgaggtgaatgcgctcgcgccagattctcaactgcgcaaaattacgacggataacgcccagataaatctggtaacgcaggacgttacctccgatgacatggtgacgttatacggcaccacatttaattccagcggcctgaaaatgcgtggaaaccttcgcagcaaaaatgccgagctgattgaaaaggtgagaacctcttatgaaattcagaacaaacaaactcagccttaagattgcgctcgccggcgcgttactggccgccagcctgccggccctcgccaagacgggcgataccgatcagccgatccatatcgaatccgatcagcagtcgctggacatgcagggcaatgtcgtcaccttcaccggtaacgtggtcgtgacccaggggacgatcaagattaacgctgataaagtggtggtcacccgtccgggcaacgagaaaggcaaagaggtgatcgaaggtttcggtaacccggctactttctatcagatgcaggataacggcaagccggtaaaaggccgggcgtcgaaaatgcgctacgagctgcagaacgattacgtcgtgctgacgggcaacgcttatctggaacagctcgacagcaacatcaagggcgacaagatcacctatctggtgaaagagcaaaaaatgcaggccttcagcgataaaggtcgacgcgtcaccaccgttctggtgccgtccgagctgcaggataaaagcggcaaccagcaaaagaagagtaactaatccgttatggcaaccttaactgcgaagaatctcgctaaagcgtataaaggccgccgcgtggtggaagatgtcagtctcaccgttaactcgggcgagattgtcggcttgctcggcccgaacggcgccggtaaaacgaccaccttctacatggtggtcgggattgtgccccgcgacgcaggcaatatcatcatcgatgacgaagacatcagcctgctgccgctgcacgcgcgcgcgcgacggggcatcggctacctgccgcaggaagcgtcgattttccgtcgcctcagcgtctatgacaacctgatggcggtcctgcagatccgtgacgatctaaccagcgaacaacgggaagatcgcgctaaagagctgatggaagagtttcatattgagcacctgcgcgacagcctcggtcaggcgctctccggtggtgaacgccgccgcgtcgaaatcgcccgcgcgctggcggcgaatccgaaatttattcttctggatgaaccctttgccggcgtggatccgatctccgttatcgatattaaacgcatcattgagcacctgcgcgacagcggtctcggcgttctgattaccgaccataacgtccgtgagaccctcgcggtctgcgaacgcgcgtatattgtcagtcagggacaccttatcgctcatggtacaccgcagcagatcctcgaagatgagcaggttaagcgcgtgtatcttggggaagacttcagactctgatagggtagaggttacagacgttttagccggagatatttaccctgaacatgaagcaaggtttgcaattaaggcttagccaacagcttgccatgacgccgcagctgcagcaggcgattcgtttgctgcagttgtccacgttagaactccagcaagagctccagcaagcgctggaaagtaacccgttgcttgagcaaaccgatcttcacgacgaggtagaggcaaaagaggtggaggaccgcgagtccctcgataccgtcgatgcgcttgagcaaaaagagatgcccgacgaactgcctctcgatgccagctgggatgaaatctataccgctggcacgccgtcgggtaacggcgtcgactatcaggacgacgagcttcccgtctatcaaggcgagaccacccagacgctgcaggactatctgatgtggcaggttgagctgacgcctttcaccgacaccgaccgcgctattgccacctctatcgtcgacgccgtcgacgatacgggctacctcacgattcagattgaagatattgtcgacagcatcggcgatgacgagatcggcctggaggaggtggaagcggtcctcaagcgaatccagcgttttgatccggttggcgtcgcagcgaaagatctgcgcgactgcctgctgatccagctgtcgcaatttgctaaagagacgccgtggctggaagaggcgcggctgattatcagcgaccatcttgatctgctggccaaccatgatttccgcactctaatgcgagtcacccgcctgaaagaagaggtgcttaaagaggcggtcaacctgatccagtccctggatcctcgccctggccagtccattcagaccagcgaaccggaatatgtcatcccggatgtgctggtgcgcaaggtgagcggccgctggaccgtcgagctcaacgccgacagcattccacggttgaaaataaatcagcagtatgcggcaatgggcaacagcgcccgcaatgacgccgacggccagttcattcgcagcaatctgcaggaagcccgctggctgattaaaagtctggaaagccgcaacgataccctgctgcgcgtcagccgctgcatcgtagagcagcagcaggcttttttcgaacagggtgaagagtatatgaagccgatggtgctggccgatatcgcccaggccgtcgagatgcatgaatcgacgatttcccgtgtcaccacgcaaaaatatctgcacagtccgcgcggtatttttgaactgaagtatttcttctccagccatgtgaataccgaaggcggaggcgaagcctcgtcgacggcgattcgcgcgctggtgaagaagcttatcgccgcggaaaaccccgcgaagccgttgagcgacagtaagctcacctccatgctgtccgagcagggtattatggtggcgcgccgcactgtcgcgaagtacagagagtctttatccatcccgccgtcaaaccagcgtaaacaactggtctgacataaccgataaggaagacactatgcagctcaacattacaggacacaacgtcgaaattacgcctgcgatgcgcgaattcgttacggcgaagttcagcaagctggagcaatttttcgaccggatcaatcaggtctatattgtgttaaaagtagagaaagtgacgcaaattgcggacgcgaatctgcatgtcaacggtggcgaaatccatgccagtgcggaagggcaggatatgtatgcggctgtcgatggtcttatcgacaagctggcaagacagttaacgaagcacaaagataaactaaaacaacactaattgtccgggcccccttgcgcccgccgctggatatcatcggcgacgggcgcgggggcgctcaggtgaaattatgatgaacaacgattcggctctacaactgagcaacgtcctgaaccaggaatgtacccgtagccaggtgcactgccagagcaagaagcgtgctctggaaatcatcagcgaactggccgccaaacagttaagtttgccgccgcaggtggtgttcgaagcgatcctcacccgcgaaaaaatgggcagtaccgggatcggcaatggtattgccattccccacggaaaactggaagaggatacgctgcgtgctgtcggcgtttttgtccagctggaaacccccatcgccttcgacgcgatcgacaatcagcctgtcgacctgctgttcgcgctgctggtgccggccgaccagacaaaaactcacctgcatacgctctccctggtggccaaacggctggcggacaaagcgatttgtcgtcgcctgcgcgcggcgcagagcgatgaagagttgtatgagatcatcaccgaagcaggaagcagcgatgacgcataacggcagtcgcaccttatcctttatcgtactgaggagaaacggtacatggtactgatgatcgtcagcggccgctcgggctcggggaaatccgtcgctctgcgagcgctggaagatatgggcttttactgcgtggataacctgccggtcgtgctgctgcccgacctggcgcggtcgctggctgaccgtaatatctccgcggccgtcagcatcgacgtgcgtaacatgccggaatccccggagatcttcgagcaggcgatgcagaatctgccggaatgtttttctccgcagctgctgttccttgatgccgaccgcaataccctgatccgccggtacagcgacacccgtcgtctgcacccgctctccagcaagaatctgtcgctggaaagcgccatcgacgaagagagcgatctgctggagcccctgcgctcccgcgccgatctgatcgtcgatacgtcggaaatgtcggtgcatgagctggcggaaatgctgcgtacccgactgctgggtaaacgcgagcgtgaactgacgatggtcttcgaatccttcggcttcaagcacggtattccgatcgatgccgattacgtctttgacgtgcgctttctgcccaacccgcactgggatccgaaactgcgtccaatgaccggtctggataaaccagtggccgccttcctcgatcggcacactgaagtgcacaactttatttatcagacccgaagctatcttgagctatggttaccgatgctggagaccaacaatcgcagctatctgacggtggccattggctgtaccggcggtaaacatcgttcggtttatattgctgaacaactggctgactacttccgctcgcgcggcaagaacgtgcagtctcgtcatcggacgctggaaaaacgtaaatcatgaccgtaaagcagaccgttgaaatcaccaataagctgggcatgcacgcccgcccggcgatgaagctgttcgaactgatgcagaatttcgatgccgaagtactgctgcgcaacgatgaaggcacggaggcggaagccaacagcgtgattgccctgctgatgctggactcggcgaaagggcgacagatagaggtggaggccagcggtccgcaggaagttgaagccctcgccgcggtgattgccctgtttaacgctggctttgacgaagactaaacgtgacgcttcccggcggcggacgactggcgattgtaccagccccggcgccggagtaacccgctaatagagcttatgctcgcgcatgaacccttccccgcccagctgtcgcatctggcgtaagatccaggcctgacgactgcgcacatagcctgacggcgcatcggcgcgatagcggatcgggttcggcagcaccgcggccagcagagccgcttcccccggcgtcagctgactggcgggtttatgaaaatagcgctgggcggccgcttccacaccaaatatcccatcgccgaactcggcaatattcaggtagacggtcaggatccgctttttactccacacggtttcgatcccgacagtcagcccggcttccagccccttacgcagccagctgcggccatcccataaaaacaggtttttcgccgtctgctgcgacagcgttgacgcgccgcggatgcgggtctcgtgacgttcattgtgcgccagcgctttctcaatcgccgacacgtcgaacccccagtgttccgggaacttctgatcttcggcggcaatcaccgccagccccatccatggggagattttatccatagcgacccagtcggaatgcgccagataatggaaatcgccggacagccaggcgctcacctgccgctcaagcatcaccgccgaaaacggcaccggcagcacgctaaacagcgcgatccccccgccccagaaaacggcggcgatcagcagcagacgcaatgccagacgttttagcagcgcaaagggcgcaatgcggagcctcatgcgctcagcgccagcacgcgggccaccagcttctcaattccggtggcggcttgcgcaatgtcctccgccagcatatacgccggagtggtgaccactttgttgtcttcatccaccacgatgtcgtcgaccgggcaaggcacgtgctctgcccccatctcttccaccacatcggcggtatcaagatcggtcccaatggttatccgcagcggaaacgcaaagatcttcggtagcatcgccggggcaatgcacataaagcccagcggcttgccggtctgatgcatcgccagcgccagggcccgcagatcgggatccacctggcattcgctgccctcggcggcgaagctgcttagatttttcgccgcgccgaatccgccagggacgatcagcgcgtccagcgtctccgcacgcgcctgcaccagcggcaggatgtcgccgcgggcgatacgcgctgcttccaccagcacattgcgctgctctggcatcgcctccccggtcagatggttgatgacatcgcgctgcggtttatcgggcgcaaagcacactgcctgcgcgccgttgcgcgcgatcgccagcagggtaatcaccgcctcatggatttcactgccgtcgtacacgccgcagccgcccagtaccacaccaatttttttcatcgctttcgctcctccatgcaactcgctgaaaccagtcaaaaatgtcgattaactcgctatgcttcacatattttactgattcatgtaacaaattagttaagctttgctatcttaatgagcgagcaatccacttcttcggttgcgccacgtaacaacatcactcaaacaacactggctcaaccaccagttccctggtgttggcgcagtattcgcgcaccccggtctgtccggggtcattttttgctggctttcgccacccacgccttcagtaccgctacatcgttttgccactcggatttcatctcttcaacccattcagcgacattatcagaccaggcaggcagatccggagtctggatctgctggcccagctgctggatgtggcgcagtccgatagaaccggccgcccctttgatcttatgcccctcttcgacaatccctttttggtcgcgggcggtcagattagactccagaacggacatgtagcccggcatcatcttctcaaacaccgcgagaccatcgttgataagcttcggtcccaccagctcgatatattgctccagcatatcggtatccagcaccgcgtcggctttatgcagatcggccgccggcgcttcctgcgcttcctcatccggtgcatcccagaatttcttgatcatggccgttagcgctggcaccgatagcggcttactcaatacatcgtccatcccggcgtcgagatactcttttttattcttcagcacgttggcggtgagggcgaccagcggcggtagctcgtcagcggcaaagcgctgtttcagttcacgggaaatatccagtccggtcatgtccggtaactgaatatccaacagcacaaggtcatattcgcctggctcaaacatctccagcgcggctttcccggtcatcgccacatcaacgctgttacccagtttttccagcactgaacgggccacaataacgttgagctcaatgtcctcaaccagcagcacgttgagcgccggtaatggcatgtcgtcttccgccagcgtatcttccacttcttccgcaatggcaggcgcatggacggtaagcgtaaaggtcgcccctttacccggctggctggtaacgctgatatcaccgcccatattacgcgccaggcgacgcgagacggcgagaccaatcccggttccggtggccggtttgccgccgtggctgtctttgacctggtaatacatggcgaaaattttgtcctgttccgcttcaggaataccaattccggagtcttccacttcgaagtgcaggatatcgccttcgtcatagcgcacgcggacgttcacccctccgccctgcggggtaaacttcacggcgttgctgataagattccacaggatctgccgcaggcgggtcccatccgtgattaccttatgcggcagcggcaggctcggctccagcacaaagcgcagccccttctgctgtgcctgcaggccggataggttttcaaggtcggcaaggaagctggtgaagtccaccggctggttatcgagctgcaccttgcggcgctccattttgtccatgtcgataatatcattgaagatattccccagcgtcaccgccgagacatggatagttttcaggtatttttcctgctcgctggtcagttcggtatccagcaaaattcggctcagcccgacgatcccgtttagcggggtacgcagctcatgactgatggtggaaataaaggtggttttatcccggctggcgcgctcaagagcgtcctgatagcgtttacgttcggtgatatcgcggccgaagcccatcaggccgcgacgcttaccgacgcgatcgtagtaggggaccttgcggatttcaaagcacgctttgcggccatcgggatagtccagccactgctcataggtcagcgatacattatggcggaacaccttctcgtcggtctccagtaccttttccgccgcctcttcgctatagacgtcctgcggtttgaggtggatcagctgtttctcgcttttgccggtcagcagctccatcgcccggttacagcctgaaaactccttatcctcattgcgatagaagaccaggtccggggaagcatcaaggaaagagcgcagaaaggaggattgctgttcgagctggatctgcgtctcttcacgctctttcatctcaatcttcaactgctcgagggtggtctcgcgctcggcttccgctttttcacgttcgccaatctcctgattcaactgcgcgatgttatctttcagttggacgttcagctttagatcgcgctcacgcatctcctccagcttgtccaccagccgcgaaagacgctgacgggactcttcgagctgctccaccaccaccgagagaaagtagaccgcccaaggcgtgatcagcaggccaaagaagatagagcggataacgtcgatactttcaacctggccatgcagcaccatggtaaccgccatctgtaccacgatggccagcaccaccagcgcaagagccaacagcatcgaaaagcggaccagacccagcttcatcatcaggtcgacataatactgcgccagcatacgaatttgcttcataggggattccttcacgacaactccgcacaataatactcaattctgagcaatgcgctgtaagttgtgcaaaaaatgcgggcaggagtcgatacggcggccggccgctgaggcgaaccagccgcaaaagagggggatcaggagagggattaacgcttgcttaacgcctcccagagtcctttcaggtaggtcacgccgagggcgcggtcgaacaagccatagcccggccgtccggtctctccccagataaagcgaccatgatccgggcgaatatagccgtcgaatccgttgtcatacagcgcttgcatcactttgtacatatccagggagccgtactctgacggatgggcgcactcgtaaaagtctttatcctgcatcagctttatattgcggacgtgggcaaaatgaattcgcttacgccgcgtaaattctgccaggatggcgtacacgtcattatcaggatcttcggcaatcgagccggtgcagagcgtaatgccgttggcgggtgaatcgacggcccggcagatccagtccagatcgtcgcggtttttgaccacccgcggcaggccaaaaatggagtacggcgggtcgtccgggtggatcgccattttcaccccaacctcttcgcaaaccgggatcaccgcctgcagaaaataaaccaggttctcccgcagcttctgatcatccaccgcgctatatttggcaaacagggtctgcacctccgccagccgttccggctcccagcccggcaaggcgaagccgtttgaattctcaagcacctccttcaccacgtcttccagccgcttatcgatatctttcttctcaaacgccatcgtcagcgagccatccggcaggacgtagttcatatccgtcttcatccagtcgaaaaccggcatgaagttatagcagatgactttaacgccaaagcgggcaaggttgcggatggtctgctggtagttggcaatatagcgctcacgggtaggtaggccgattttgatgtcgtcatggatgttgacgctctctatcacctccattttcaggcctgcggcatgggcctgaccgaccagacgctcaattttatccaccggccatacttcgcccaccgcgacgtcgtagagcgcgccgaccaccccctcaacgccaggcacctggcgaatatgttctaatgaaatcttgtcttcctctggtccaaaccagcgcattgtcatctgcattgtcttcacctgctcaacttagtttaatttaccctactaccataccagcaatcatagatgattgagcgttggctgtcgtgatagcgatcacattcctgccgaccggctcgccagcggtgaatgcgtcggcgcattcataatttttttcaatttatttcaatagattaatcatgccatggctttttctgccgagcttcctcaaatgtgatccaggcctgattatgatcttttgcatacttgtatggtaataaaagtagcgtaatttgttcagaaaaaagacaatggaaggaatcaaaatgagaagcgtcgtcgtcaaagagccaggccaactgaacattgaatcacgtccggttccagttccgggcgcccatgaagtacgggtgaaaattgcttttgccgggatctgtggttccgatgtacacatctatcacggccacaaccctttcgcgaaatatccccgcgtcatcggccatgaattctatggcatcatcgacgccgtcggcgagcaggtatctccggcacgcatcggcgagcgtgtcgcggtggaccccgttgtcagctgcggccattgttatccttgctcggtaggaaggccgaatgtctgtacgcagctccaggtcataggagttcaccgcgacgggggatttagcgactatgcctgcgtgccggcgaaaaatgcctggcgcatccccgaggctatcagcgaccgtcaggcaacgatggttgagccttttaccatcgcggcaaatattaccgcccagctgcagcccacggcgcaagatattgccctggtttacggcgctggcccgatggggctgacaatcattcaggcgctaaagggggtatatggcgttaagcaggtgatcgtcgtggatcgcattgccgaacgtctgcagatggcccgggaaaacggcgccgatctgacgctcgataacactgaccagccgctcgcggaacagctggcgcagcggcagcttgcccccacgctggtcattgatgccgcctgccacccggcgatcctgcaggaagccattctcctcgcctcccccgccgcccgcatcggtatactcggtttctccggcgaggcctcaaccctcactcagcaaagcatcaccagtaaagaaatttctattttctcctcccggctgaacagcgggcgttttccgctggtcatcgactggatggagaaaggccttattcgtccggaggcgttaatcacccattgtatgccgctggagcaggtgaaagaggccatggagatttttgctaacgaccgtaagacctgctgcaaagtgctgctgcagctgggttaaaccggcatcgtatagaataacggccgacggatatctgcgtatccgccgcgcctgatataaataatataatgagcatggtgttatcatgggaaaaaatatccgctggattatcgtcctgttattatttttagtatatatgataaattatctggaccgggtggcattatccattacggtcccgatgattgaaaaggaccttgcacttaacgctgaacaattcggcattattttcggcagctttttcttcggctacgcggtatttaattttattggcggtttggccgtggataagtttggcgcaacgctggtaatgggcctggcggtcggtctgtggtcgctgttttgcggcttaaccgcggtagccaccggcttttattccatgctggtgctgcgggtgcttttcgggatggcggaaggcccgatctgcgcatcggcgaacaagatgatcaacggctggtttcctaaaaagcaagcggctaccgccgtcggctttctcagcgcaggctctccgctgggcggcgcggtcgccggccccatcgtcggttacctggccctggcattcggctggcgcccggcttttatgattattttcgctatcggtattgtatggatgatagcgtggtttttcattgccgctaattcgcccgaaaagcacaaaaaagtcagccaggaagaacttaagctgattaataaaatgaaagaagaagaagtcgcgctggaaacaatagaaaatcaaacagctcactcgctgggttattatttgaaacagccaattattctggtaacggcctttgccttcttctgctacaactatattctgtttttctttctcagctggttcccgtcctatctggtacaacagcaccatctggatattaaacagatgagccttaccactatgatcccatggatagtcggctttgtcggtctggcgcttgggggctatatttccgataaaatttttaaactcaccgggcgcctgctgctgtcgcgcaaaattgtgctggtggtatgcctgctgatggccgctatctgcgtgggactggcgggtaccgtcagcagcgtcgtgcctgccgttctgctgatgtcggtctccatctttttcctctatgtaaccggggcgatctactgggcgattatccaggacgtggtgcataaatcccgcgtcggcggcgccagcggctttatccatcttatcggcagcgtctccggcatcgtggggccgattgttaccggctatatcgtgcagtctactggtaaatttgacagcgctttcgtactcgccggcactatcgccgcgcttggcgccctgctggtgctgttcgtgatcaaaactccgcgtgtgacgatgaaagccagccaggcataaatggcaggagcgcgatgtccggcattgttccggacatcgcgctcgtacttctcactcagcctggggagcaacccagctacggcccagcgccgagccctgagcgccctgctgattcagataacgatccagttcaaccatgccggtccagcgattttcacaccacagcggcgccaacagcgtgggccgacgggcgctggcggaaatacggtggtagatcacctccggcggcgtatggcggatcatctctccagcggtgacggtatacgcctccagctcaatgccatcgagacgcccggcctgccacgctttggccataatgctgcctttcacaatatgcagtggatgcaatttgatcccatccacgccggtcgccactacctgctccagcgtctgcagacaatgcccctggctctctccgggcagaccgacgatcagatgcgtacagactttcagcccccgctctcgcgccaggcgcgcggtacgctgataacaggcgaaatcgtgtccacggttaatgcgatgcagggtcttatcatgagcagtttgcagccccagctccagccatacctcatacccttgctgatggtattcactcagcaggtcaaggaccgcctgcggaacgcagtccgggcgggtgccgacgcacaggccaacgatatttgcggcactgacggcctgacgatacattgaacggagcacctgcacttcagcgaaggtgctggtgtaggcctgaaaataggccagatagcgcttcgcccggttgacgagctgcgcctgatgagcgagctgttcggcgatagagcgatgctgctgcgcctcatcggcaaacgatgccacgttacagaaagtgcaaccgccgcggcccagcgtgccgtcgcggtttgggcagctaaaaccgccgtgcagcgttagcttatggaccttttcgccatagcgacgcataagatccccaccaaacatattgactaatttctgtaactgcataatctgatagaccgccctcaacaaagggggccaagcctgccacttttcgtcaccgacggcgatgacctggatcaatcgtcagcgcggcgaccaaccctattgcataagcaatcaagattactgcaatttcattcaaccaccaggtgatgagttttccttatattttatcttcgcattgccctaatctgctttctggtaaaaaacggtattaatgtccagtagttaaaaatattgcagtcaaatatgctaataatgaaatatatttcagcgcatattggtaatgcaaagccgcgtgcacagtgagacagatcacactagccgcaccaccagcaggcgtattcaaagcataaaaattgccattattttctttaataacaattagttaacttgtgtatagcacatttttgtattaataagattgccatttgacgtaagtgtggattcccgataagttgggaatccgctggaagctttctggatgagcactctgctcatcatatttatgcagtaattgagattccctcttaacagcaagtcctcaaacttgtgtaccgatgcgaaaaggatttaaagagggcgaatgcgaggtgtaaaccccgtcgccatgctctttctgtgcctgtgcgcaatcggtatcggagggtgtccgtagagcctggggaggttcactgatatgttgtacgacaaatcccttgagagggataactgtggtttcggcctgatcgcccacatagaaggcgaacctagccacaaggtagtgcgaaccgcaatacacgcactggcccgcatgcagcaccgtggcgcaatccttgccgatggtaaaaccggcgacggttgcggtctgctgctgcaaaaacccgatcgtttcttccgcatcgttgccgaagagcgcggctggcgtttagccaaaaactacgccgttgggatgctgttcctgaataaagatcctgagctggctaaagcggcgcgccgcatcgttgaagaagaacttcagcttgagaccctgtcgattgtcggctggcgcgatgtgccgaccaacgaaggcgtgctcggtgaaatcgccctctcctcgctgccccgtattgagcaaatctttgtcaacgccccggctggctggcgcccgcgcgatatggagcgccgtctgtttattgcgcgtcgtcgcattgaaaaacgcctgcaggaagacaaggatttctacgtttgtagcttgtccaatctggtcaacatctataaaggtctgtgtatgccggcggatttgccgcgcttctacctggacctcgcggacctgcgcctggagtcggctatctgcctgttccaccagcgcttctccaccaacaccgtaccacgctggccgttggcgcagccgttccgctacctggcgcacaacggtgaaattaacaccattaccggcaaccgccagtgggcccgcgcccgtacctataagttccagaccccgctgatccctgacctgcacgacgccgcgccgttcgttaacgaaaccggctccgactccagttccatggacaacatgctggagctgctgctggccggcgggatggacatcgtgcgcgccatgcgtctgctggtgccgccagcctggcagaacaacccggatatggatccggagctgcgttcgttcttcgactttaactccatgcatatggagccgtgggacggcccggcgggcatcgtcatgtccgatggccgctacgcggcctgtaacctcgaccgtaacggtctgcgcccggcgcgctacgtcattaccaaagataagctcatcacctgcgcctccgaagtcggcatctgggattaccagcctgacgaagtggtcgagaaaggccgcgtgggcccgggcgagctgatggttatcgatacccgtgccggacgcattctgcactcagcggaaaccgatgacgatctgaagagccgccacccgtataaagagtggatggagaaaaacgttcgtcgcctggtgccgttcgaagatctgccggacgaagaggttggcagccgccagctggatgacgacacgctcgccagctaccagaaacagtttaactacagcgcggaagagctggactccgtcctgcgcgtgctcggcgaaaatggccaggaagcagtcggttcgatgggcgatgacacgcctttcgccgtgctctccagccagccgcgcattatctacgattacttccgtcagcagttcgcccaggtgactaacccgccgatcgacccgctgcgcgaagcgcacgtcatgtcgctggctaccagcatcggtcgcgaaatgaacgtcttctgcgaagcggaaggccaggcgcatcgtctgagcttcaaatcgccgatcctgctgtactccgattttaaacagctgacgacgatggaagaagagcactatcgcgccgacgtcctcgatatcacgttcaacccggcagaggcctccctcagcgagacggtgaaagcgctgtgcgataaagcggagcaaatggtgcgcgacggcaccgtgctgctggtgctctctgaccgcaacatcgccaaagaccgtctgccggtaccggcgccgatggccgttggcgcgatccagacccgtctggtcgataaaagcctgcgctgcgatgccaacatcatcgttgaaaccgccagcgcccgcgatccgcaccacttcgccgtgctgctcggctttggggcgacggctatctatccatacctcgcctacgaaacgctggcgaagctggtcgacagcaaagccatcgataaaccgtaccgtgcggtgatgctgaactatcgcaacggtatcaataaaggtctgtataagatcatgtccaagatggggatctcgaccatcgcctcctatcgctgctcgaagctgttcgaagcggtcggtctgcatcgcgatgtctccgatctctgcttccagggcgtggtcagccgcatcggcggcgccagcttcgacgacttccagcaggatctgctgaatctgtcgaaacgcgcctggctggcgcgtaagccgctggcccagggcggtttgctgaaatatgtgcacggcggcgaatatcatgcctacaacccggacgtggtgcgcaccctgcagcaggccgtgcagagcggcgaatacagcgattatcaacaatacgcgaaattggttaacgaacgtccagcggccacgctgcgcgacctgctggcgctcaacccaggcgaagacgccatcagcatcgacgaagtagagccggcgaaggagctgtttaaacgcttcgataccgcggcgatgtcgatcggcgccctgagcccggaagcgcacgagtcgctggcggaagcgatgaacagcatcggcggcttctccaactccggtgaaggcggtgaagacccggcgcgctacggcactaataaagtgtcgcgcatcaagcaggtcgcgtccggccgcttcggcgtcacgccagcctacctggtcaatgccgacgtcatccagatcaaagtcgcccagggggcgaaaccgggtgaaggtggccagctgccgggtgataaagtcaccccgtacatcgccaaactgcgctattcggtaccgggcgtcacgctgatttccccgccgccgcaccacgatatctactctatcgaggatctggcgcagctgattttcgacctcaagcaggtcaatccgaaagcgatgatttcggtcaaactggtttctgagccgggcgttggcaccatcgccaccggcgtggccaaagcctatgccgacctgatcaccatcgccggctacgacggcggcaccggggcgagcccgctctcttcggtgaaatatgccggctgtccgtgggagctcggcctagtggaaacccagcaggcgctggtcgctaacggtctgcgtcataagatccgtctgcaggtggatggcggcctgaaaaccggtcttgatatcatcaaagcggcgatcctcggcgcggagagcttcggtttcggtaccggcccgatggtcgcgctgggctgtaaatacctgcgtatttgccacctgaacaactgcgctaccggcgtggcgacccaggatgacaaactgcgtaagaatcactatcacggtctgccgttcaaagtgaccaactactttgaatttatcgcccgtgagacccgcgagctgatggcccagctgggcgtcaagcgtctggtggatctgattggccgcaccgatctgctcaaagagctggatgggttcaccgccaagcagcagaaactggatctgggtaaactgctggagaccgcagagccgcatccgggcaaagcgctgtactgcaccgagaacaacccaccgttcgataacggcgtgctcaacgcccagctgctgcagcaggcgaaaccgtacgtggatgaaaagcagagcaagacgttctggtttgatatccgcaacaccgaccgctccgtgggggcctcgctgtccgggtatatcgcccagacccatggcgaccagggactggcgggcgacccgatcgtcgctcactttagcggcaccgcgggccagagcttcggcgtgtggaacgccggcggcgtggaactgcatctgactggcgacgccaacgactacgtcgggaaaggcatggcgggcggtctgctggccattcgtccgccggtgggctctgcgttccgcagccatgaagccagcattatcggcaacacctgcctgtacggcgcgaccggtggtcgtctgtacgccgcaggccgcgcgggcgagcgtttcgccgtgcgtaactccggcgccatcaccgtggtggaaggcatcggcgacaacggctgcgaatatatgaccggcggcatcgtctgcgtgctcggaaaaaccggcgtcaactttggcgcagggatgaccggcggctttgcctatgtcctggatgaagatggcgacttccgcaaacgcgtgaacccggagctggtggaagtgctggacgttgattctctggccatccatgaagagcacctgcgcggtttaatcaccgagcacgtacagcttaccggttcgcaacgcggcgaagagatcctcgccaactggccggccttctccgcgaagtttgcgctggttaaaccaaagtccagcgatgttaaagcactgttgggtcaccgtagtcgttccgcagctgagctgcgggtgcaggcgcagtaaggggttaagatgagtcagaacgtttatcaatttatcgacctgcagcgcgttgatccgccaaagaaaccgctgaagatccgtaaaattgagtttgtggaaatttacgagccgttttcagaaggccaggccaaggcgcaggcggatcgctgcctctcctgtggcaacccgtactgcgaatggaagtgcccggtgcataactacatcccgaactggctgaagctggccaacgaggggcgtatttttgaagcggccgagctgtcgcatcaaaccaacactctgccggaagtctgcgggcgcgtctgcccgcaggaccgcctgtgtgaaggctcctgtacgctgaacgatgagttcggcgcggtgaccatcggcaacatcgaacgctatatcaacgataaggcattcgagatgggctggcgtccggatctctccgacgtgaagccgaccggtaaaaccgtcgcgatcatcggcgctggcccggcgggcctcgcctgcgccgacgtgctgacccgtaacggcgtcaaggcggtggtatttgaccgccatccggaaatcggcggcctgctgaccttcggtatcccggcgttcaagctggaaaaagaggtgatgacccgccgccgggagatcttcaccggcatgggcattgagttcaaactcaataccgaagtgggccgcgacgtgcagctcgacgacctgctgaaggagtacgatgcggtgttcctcggcgtcgggacctatcagtcgatgcgcggtggactggacaacgaagacgctccgggtgtttacgacgcgctgccgttcctgatcgctaacactaagcagatcatgggctttggtgaaaccgccgatgagccctatgtcagcatggaaggcaaacgcgtggtggtgctcggcggtggcgataccgcgatggactgcgtacgcacctccgtccgtcagaatgcggcgcacgtgatctgcgcctatcgccgtgacgaagagaacatgcccggctcaaaacgcgaagtgaaaaacgcgcgcgaagaaggcgttgagttccagtttaacgtccagccgctgggcgtggaagtgaatgccaatggtaaggtttgcggcgtgaagatggcgcgcaccgaaatgggccagccggatgcgaagggccgccgccgcgcggagatcgtccccggctctgagcacgtggtgccggctgacgccgtagtcatggcgtttggcttccgtccgcacagcatggagtggctggcgaagcacagcgtcgaaatggactcccagggccgtattatcgccccggaaggcagcgaaaacgccttccagaccagcaacccgaaaatcttcgccggtggcgatatcgttcgcggttccgatctggtggtcaccgcgattgccgaaggccgtaaagcggcggacgggatcctcaactaccttgaagtctgattaggtccggagcctcacgcataaaagcccgatggttaacgtcatcgggcttttttattgctcattcgccgggcaaaccgccgctttcagcgccgtattataccagccgcagatatgctccaggcgggtaatcgccgagccgacggtcaccgcccacgcgccgcaacgcatcgcctccgccgcctgggcaggcgtgttatagcgcccttcggcaatcactctgcagcccgcaacgctcaggcattgcaccagcgccagatccggctcatccggcgtctcctctgcggtatagccggagagagtcgtcccgacaatctcagcccccaactgccagcactcgagagcatcgtcgagagatgagcaatcggccatcgccacttttcccagctgatgaatttctgctaatagcgccgacactgacgccggacgctgacgctgggtgccgtcaatagcaataatatccgctccgccctgcgccagcgcgtcgatatcttccagccatggcgtaatacgcaccgggctatcgggcaaatcgcgtttgatcaacccaataacgggcactgtcactaacggacgaacggcctgcaggttggccaggccttcgatgcgcagcgctaccgctcccgcctgctcagccgccagcgccattgctgcgacgatagcgggattatccagcggactgcccggcaccggctggcaggagacaattaatccgccatgatgacggatacgctggtccagttgtgcgagtaaagacatgtctgctccctaaaaactacctgtggcgatgacgataccagccatgggacgcctcgtttgtggcagagttaacaaagcggacagacaaaaaaacaggccccgcagggcctgtcagagaagggatttacttcaccacgcgcagcgccgggcgaccaccgcgcggcggcggcgtgtcgtcaggatcgtcgtcgtgattatccggcttatcgccatcgatcaccgacatcaccgtttcgctttcactctccggcgcgacgtcatcatcgttgaggctgctgacgtcttcgtcataggccgcttccggttcgaacatcgtaccagcgccgttctcacgggcgtagatggcgagtaccgcagccagcgggacagacacgttgcgtggtaccccgccaaagcgcgcgttgaagcgcacttcgtcgttcgccagctcgagattgcctaccgcacgcggggcaatattgagaacgatttgcccatcgcgcgcgtactccatcggcacgagcacgcccggcagcgtcacatccaccaccaggtgcggcgtcagctggttatccagcagccagtcataaaacgcccgtaacagatacgggcgacgcggcgtcagctgtgatacatccattatttagccccgaccgaggcgcatttcacgctcggcttcagttaaagaagcgaggaaggaatcacgctcaaatacgcgagtcatatagcctttgagctctttcgcgccagcgccaaccagctccacaccaagaaccggcagacgccacagcagcggcgccaggtagcagtccaccaggctgaactcatcgctcaggaagtaaggtttctgggtgaagaccggcgcgatggccagcaattcttcacgcagctgcttacgcgcagcatcagcttgcgctgcggtaccgctctggatggtgttcatcagcgaataccagtccttctcgatacgttgcatatacaggcggctttcaccacgcgccaccggataaaccggcattaacggcgggtgcgggaaacgctcatccagatactccataatgatgcgggattcccacagagtgagctcacgatccaccagcgtcggtacgctttgattcgggttgaggtcaatcagatcctgaggcgggttatccttctccacgtgctctatctcaaaactgacacccttctcggccagcacaatgcggacctgatggctatagatgtcagtaggaccagaaaacagcgtcattaccgaacgtttgttggcagcgacagccatgaaaacctccaggtatattcagaattttgtactgctgccggccactcatgaccagccagatgtaaaaaccccattagcgcgatgtcaccttcgttcacgaataaaacaaaaaatgaacaatcaccagcatttgggcagaaaattggatgatagtttaccagattttgaagacgttgtggtgaggggattctggaaatgctgaaaaagtggcgagaaccggcgctatgcttgtggataacagccgttttatccataaaaaaacccgccgaagcgggttttttcgcaaattgttctgcgtgagcaggaaacaattaacgtttggagaactgcggacgacgacgtgctttacgcagaccgactttcttacgttcaacctgacgagcgtcacgagtaacgaagccagctttacgcagttcggaacgcagggactcgtcgtactccatcagagcgcgggtgataccgtgacggatcgcaccagcctgaccagaaataccaccacctttaacagtgatgtacagatccagtttctcaaccatgtcgaccagttccagcggctgacgaactaccatgcgggcagtttcacgaccgaagtactgttccagagaacgctggttgataacgattttaccgttgcccggtttgatgaaaacgcgagctgcggaacttttgcggcgaccagtgccgtagtattgattttcagccattgcctataatcccgattagatgtcaagaacttgcggttgctgtgccgcgtggttgtgctcgttacccgcgtaaactttcagtttacggtacatagcacgacccagcgggccttttggcagcatgcctttaaccgcgatttcaatcacacgctcaggacggcgggcaatcatctcttcaaaggtcgcttctttgataccaccgatgtggccggtgtggtggtagtacattttgtcttcgcgcttgttgccggtaacagcaactttttctgcgttcagaacgatgatgtaatcaccggtatcaacgtgcggagtgtattccgctttgtgcttaccgcgcaggcgacgagccagttcagtagccagacggcccagagttttaccggtcgcgtcaacaacataccagtcgcgttttacggtttctggtttagctgtaaaagttttcattaaaagcttacccaaataataagttacacgttggtgaacacccaaacgtttagtcagttgaggttcacacgacattgtccagcaaacctaccccttcgaatagcctatgccggcgcatagaaagtttcgggaaaaaaaccttctcgtaacgtggggtcgcaagattatagagaagtcggggtcaaagatcgacccctttatgagatttttcaggccgcgcccggggcggccttacggccctgaatccgcctgaaaaagtcacctgtcagggcatatgcggacgtttgaggtactcttcgctctgcatctcctgcagacgcgagagacagcgctggaactcaaacttcagccgctcgccctggtaaatgtcgtacagcggtactgccgcgctgaccaccagctttacatggcgctcgtagaactcatccaccagagcgataaagcggcgggcctcgctctccagctgcgcggtcatcaccggcacgtcgaacagcatcaccgtatggaacagtcgggagagcgcgatatagtcatgctggctgcgcgcatccacgcatagcgtggcgaatgacgccgccagcgtctggttttctacgccgagggtaggcagctcgcgatggttaatctccagcgtcggcccggcagcgcgcggcgcgcccgccagcgcgagccacaatttatccatctgttcgcgggtgtcgttattcagcggcgacagccacaggtgcgcctgcgtcagggtacgcagtcgataatcgatgccggcatcgacgttcataatatcgcaatgctgcttgatggcgtcgatcgccggcagaaaacgggcccgctgcaggccattgcgatagagttcatccggcggaatattggaggtcgccaccagggtgatgccgcgggcgaacagggctttcatcagcccgcccaacagcatggcgtcggtaatatcggagacaaaaaactcgtcgaaacagagcacgtcggtttccgctttaaagcggtcggcgacgatctccagcgggtcgctatgtccctgcagggtggtcagctcttcgtgtacgcgcagcatgaaacgatggaaatgcaggcgctgtttacgctcgcccggcaggctctggtaaaacaggtccatcagccaggttttgcctcgccccacgccgccccacatatacaggccgcggacaggtgccgtcccggcagccggctcgcgcttacccagcagtttgccgaatttcgcgcgcaaaccgccgcctgacgcgaccggcgcgggctgcgtctgcagttcctggtaaatggtatcaaggcggctcaccgcttcttgctggacgtcgtcgggttgatggctgccctctttcagggctaaaaggtaacgcgatgttggagacaggctttgcatgatctaattgttattccttgaaaaccgtaatgccgaagctcacgattgacgaaaaaaaggccgttctacactacgcgatgatacgccaggattccacttctgtggaattagcggttatagtggcactatcgggcgcaggcggagagcctaagagccaccctacggaaccacaatacaacgggagatgttcatgacctgggaatacgcgctaattgggttagtcgtcggtatcatcattggtgccgtcgccatgcgtttcggcaaccgcaaactgcgccaacagcaggcgctgcagtacgaactggaaaagaataaagccgagcttgaagagtaccgtgaagagctggtgagccactttgcgcgtagcgccgaactgctggataacatggcgcacgactatcgtcagctatatcagcatatggcgaaaagctctaacaacctgctgccggactcgatggcagacgccaacccgttccgcaaccgtctggaagagtctgaagccagcaacgatcaggcgccggtccagatgccgcgcgactactccgagggcgcatccggtttactgcgcggaggcgcaaaacgcgattaagcctcgctgcgattaaaatattctccgggcgcgcccgtcgcgcccgctccttcccccacttcccggctacaatttaaaccagtccccacgttgttacctgtgcaaaaattcaataacatcaggttattcaggacatttttccatacacctcaggttacgagagccagcatctaatgaagaaacagactttgctgttgagtgcgttagcgttaagcattgggttatcgttgtcggtcctgcctccggcagcggcatccttaccgactcaggtgcccggccagggcgcgttaccaagcctggcgccgatgctggaaaaggttctgccggcggtggttagcgtacaggtggaaggcactgcctcgccgacgctcaatatgccggaagagctgaaaaaatattttggcgataacgccccgcaggagcaggcgcagccgtttgaagggctcggctccggcgttatcatcgacgcggcgaaaggctatgtgctgaccaataaccacgtcatcaatcaggcgcagaagatcagcgtccagctgaacgatggccgtgagttcgatgccaaactagtcgggagcgatgaacagagcgatattgctctgctgcagctgattaagccagaccacctgacgcaaatcgccattgctgactctgataaacttcgcgtcggcgacttcgccgtcgccgtcggcaacccgttcggccttggccagaccgccacatccggcattatctctgcccttggccgcagcggcttgaaccttgaagggctggagaatttcattcagaccgacgcctcgattaaccgcggcaactccggcggcgcgctgctgaacctcaacggcgagcttatcgggatcaacaccgcgatcctcgcgccgggcggcggcagcatcggcatcggctttgccattccaagcaatatggcgaaaaccctcgccgaccagcttattcagtttggcgaaatcaagcgcggcctgttgggcattaaaggcatggaaatgagcgccgacatcgccaaagcgatgaatctcaacgttcagcgcggcgccttcgtcagtgaagtcctgccaaactccggctccgccaaagcggggattaaatccggggacgtcatcgtgagtctgaacggcaaaccgctgaacagtttcgccgaactgcgttcgcggatcgccaccaccgaaccgggtaccaaggtcaaactgggcctgctgcgcgacggaaagccggtcgatgtcgaagtgaccctggataagagcacctcctcaaccgccagcgcggaactgattatcccggcgctgcagggggcctcgttcagcgacggccagatgaaagatggcaccaaaggagtggtgatcgataatgtggataaaggcagcgccgccgcccaggtcggtctgcataaggatgacattatcattggccttaaccggcagcgtattcactcaattgccgaactgcgcaaagcgctcgaaggcaaaccgccggtcatcgccctgaacgtgatccgcggcaacgaaagcatctatctgctgctgcgctgattgtctctccgggcatcgccgccatgtgcgatgtccggacaactcatgctatgctgcgcctgaccattcattaacgatatctgcatcatgcctggaaagttattacgttcagtactcatcggtttgcttgtcgggggtctgctgctggccctgatgccctcgctgcgccagtggcagttggcgccgactacccagaacgatacggcagacgactccccggcgagctataacgccgcggtgcgccgcgcggcgcccgccgtggtgaacgtctataaccgcgcccttaacagcaccagccataatcagctgacgcttggctcaggggtgattatggatcagcgcggctatatcctgaccaacaagcatgttatcaacgatgccgatcagattatcgtcgccctgcaggacggccgcgtcttcgaagcgctgctggtaggatccgattccctcaccgatctcgccgtgctcaagatcaatgctaccggcgggctgccggtgatcccgatcaatccgaaacgcacgccgcacatcggcgacgtggtgctggcgattggcaacccttataacctggggcagaccatcacccaggggatcatcagcgccacagggcgcattggcctcaatccgaccggccgccagaacttcctgcagactgacgcctcgatcaaccacggtaactccggcggggcgctggtgaactccctcggcgagctgatggggattaacaccctctcctttgacaagagcaatgacggcgaaacgccggaaggcattggctttgcgatcccgttccagttagcgaccaaaattatggataaactgatccgcgatggccgggtgatccgcggctatatcggcattagcggccgggagatcgccccgctgcacgcgcagggcggagggatcgatcagattcaggggatcgtcgttaacgatgtggccccggacggtccagcggcgcaagccgggatccgcgccaacgacgtaatcatctccgtgaatgacaaacccgccgtctcggcgctggagacgatggatcaggtggccgagatccgcccgggatcggaaattccggtggtcatcatgcgtgatgataagaaaatcacgctccatatcgccgtccaggaatacccggccaccaactaaacggctccccgtttggggagccacgttaatcgctaaataccggaccggccgggaatctgaccagaaacccggtcaccgccagcagcgatctcagcgcgggccagactatctgtcgctcgcgaagctcatcatccagcgtcagtagcgcaaattcccccttctcacccagcacgccaccctgccagagcagacgctgcgcctgctgccgcgcccagggcgaatcactcttccaggccagcaaatgcagcagcgcctgctgtagacagacgctgtgagaatggttatcccgccgcagccgccggtagacgggcagggacacgctgcgcacggtataaaatccactgcccgcctcttcatcgccttcagggatagcgcgggcgaactgccccgccacgtcacacagccggttgtgcgtcagtggaagttgccgggcgctgagcgccccggccgccatgcacagcagaccgctgcgctgcagcgagggcgtcgcagagcgcacgaccgccgccggtaaggcgctcaccgcccgtgttgcctcgtcagcgttgtggtcagcgccggcctcataacagctggccagcagcgcttcaccaggcgtggcgttcagcgggggcgaaagcaggttcagcgccggctgcagttgtgcaagttcatcgcctgacgccagcatggcgtcaaccaccgcctcccgtgttgatgtccggttttccggacagcatgctatgccttcattcatcaccgtctccttatgagaaatctccgcggccggcttgccagccgcgggaacaggctggcttacatcgccagcacgtacttgagcatcaccccggcggcgatcgccgagccgatcacccccgccacgttcgggcccatcgcgtgcatcagcaggaagttctgcccgtccgcttccagacccaccttgttcgacacccgcgccgccatcggcaccgccgacacccccgccgagccgatcagcgggttgattttgtgccggctgaacacgttcatcagcttcgccatcagcaccccggcggcggtccccacgcagaaggcgatcacccccagcaccaggatccccagcgtctgcggctgcaggaacttgtccgccaccagcttggcccccaccgacagcccgaggaagatggtgacgatgttgatcagcgcgttctgcaccgtatcgctcagccgctccaccacgccgctctcgcgcatcaggttgccgaagcagaacatccccagcagcggcgcggcgtccggcagcaggagcgccaccagcagcaacagctccgccgggaagaggatcttctcccgcttactcaccgtgcgcagctgcaccatacggatcttccgctccttatccgtggtcagcgccttcatgatcggcggctggatcagcggcaccagcgccatataggagtacgccgccaccgcgatggcccccagcagctccggcgccagcttgcccgacaggtaaatcgccgtcgggccgtcggcgccgccgatgatgccgatggccgccgcctgcggcagggtgaagctgatgatgccgaagtagttcagcgtcagcgccccgagcacggtggcgaagataccgaactgcgccgccgcccccagcagcagggtgcgcgggttggccagcagcgggccgaagtcggtcatcgccccgacgcccatgaaaatcaccagcggcgcgatgcccgagccaatcgccaccttatagaagatggccagcaccccggcggagtagcccatgtccaccgcgaggctctccatctgcccctgcaccgacggcagggccagcgccagtgcctctttgatggcgtggacgtccggcgcgcagtggagcttcgcggcaatcaccgccagctgcgccgggtcgtggtgagccagcaggctctccagggcggtgagcgccagcccggcctccgggatattggagagcaggccgccgaagccaatcggcagcagcagtaacggctcgaacttcttcgcaatcgccagccagagcagcagcaggctgaccagcagcatgatggcctggccggcgccgaggtgcatcagccccatgccctggatcagggcgttcagactttccatttccgctcctcgtccttacgccagagtcatcagggtgtcgccgaccgccaccgcgtcgccggctttcaccgcgataccgcgcacggtcccggcctgcgcggcacggatttcggtttccatcttcatggcttccagaatcagcagcacctcgcctgcggccaccgtctggccttccgcggccagcaccttccagatagtgcccgccagcggggcggtcaccggggtaccggcgccggccggggcggcagcctgaaccggtgcggaagacggggtggccgccgtcagctggctgacgtcgccgccgtcgctgactttgaccacgaaggctttgccttccacttccacggtgtagacgccggaggcggcaggtttttctgcttttgccactggctgcgcggcttccacctgcggcaccggctcaaaggccgccgggttgtggcggttttcgaggaacttcaggccgatttgcgggaacagcgccacggtgagcacgtcgtcgatggcgttttcggcaagcgtgatgcccttctcctgcgcctggcgtctgacgtcggcttccagcgcggccagctccggcttgagtaaatccgccgggcggcaggtgacggcgtcggcgccgtcgagcacccgcgcctgcagggcggcgttcaccggcgccggggtgcgaccgtactcgcctttcaggataccggcggtctccttcgcaatggttttgtagcgctcgccggtcaggacgttgagcaccgcctgggtgccgacaatctgcgaggtcggggtcaccagcgggatgaagccgaggtcctcgcgcacgcgggggatttccgccagcacctcatccagacggtgggcggcgctctgctgcttcagctggccttcaaggttggtgagcatcccgcccggcacctgggcgacgaggatacggctgtcggtgcctttcagctggccttcgaaggcatggtattttttgcgcacctcgcggaagtatgcggcgatgctctccagcctgtggatatccagcccggtgtcatattgcgtgccggcgagggtggccaccagcgcctcggtggccgggtggccataggtggcgctcatggacgaaatcgccgtatccacgccgtcgaccccggcttcaatggccttcagcagcgccatctccgccatgccggtggtggcgtggcagtgcaggtgcagggtgacgtcgtagcgcttcttgatttcactgaccagctcaaaggcggcatgcggcgtcagaatgccggacatgtccttgatggcgacggagtcaacgccggtctccagcagctgttcggtgaggtcgagccaggtctgcagggtgtgggccgggctggtggtgtacgaaagcgtacactgggcgtgggcgccgtgccggcggaccgcctgcagggcggcctgcatgttgcgcgggtcgttcatggcatcgaagacgcggaagacgtccatgccgtttttgacggcgcgctccacgaagcgctccaccacgtcgtcggcgtagtggcggtagccgagcaggttctggccgcggagcagcatctgcagcggggtcttgggcatcgcctttttcagctcgcgcaggcggacccacgggtcctcgccgagaaagcggatgcaggcgtcaaaggtggcgccgccccagcactccagcgagcggtagccgacgtcgtccagctgagcggcaacgggcagcatatcgtcgagacgcagacgggtggcgaacagggactggtgggcgtcgcgcaggacgacatcggtaatggcaacggtcatgaattcctccgtgaattaagggtgaagacggcgatggtggtgaatggcggcgacaatcgccggcttcaggcgggcgaaatcgtcggcgggcgcgacggcggccggcgccggtttgggggcggcgggcggctcgggaaacaggcggttgacggcgagggacattccccggatggcgaaaatgagcagcagcaggaacaccagcacaaagcccatgccgagaaacatcagggtgaagccttcgcctaacaggatggcattgtcagtcataaaatggcctttggggggagcgcaataatggcttacggtagcccacgtcagcagagtggatttccccggaccgcctggtcagaagcctcggtttagcagtcagctgccgctgccattactgcgcgatatattcaatcggggttatttaataaagctcacgtgtttgcagatttcatcggcgacaatttctttgcgctgattaaagatcactttattctgctcaaacaggttattgccgtgagtatcgatcgatacaattaacggcccgaactctttcacccggcaaacccataacgtttctggcatgcctaaatcacgccattgcgcatcttcaatctcttccacacagaccgcggcgactaccgcgcagccggcagggaacacacagtgcaaggctttatgttccatacagccctcttcggttcctttgcccataccacctttgccgacgattaatttcacaccggtcttagcaataaattctttttcaaatttttccatgcgcatactggtggttggcccaacggagaccatttcaaatttatcttccgtacctttaatcgggcgcacaatgggcccggcatgtaatatcgcgccaccagcaacgtttaccggtaattcacgtccgccctcaattaagcgacgatgagccacatcacggcaggtcacaatatggccgttgagataaataatatcgcccgctttaatatccgctaaatcttcatctttaatgggcgtagtgagtatttttttagtcatcagaatgccactcctttgtgagacgtaatggtgtagttcaggtctttatcgaaaacgatatgccctttacggtgcgaccagcagccgacgttgaccgccacgccaatagtggaagggtggcgtgcggtattttcgatattgacgcccatcacggaggtattgccggacattccctgcgggccaaggccaattttgttgatgccgtcttcgagcattttttccagcaatgccgcacgttcgttgtcattgtgcgaaccaatcggacgcatcaacgctttcttcgacagcagcgccgcggtttctacagacgtcgccaccccaacgccaaccagcagcggcgggcaggcattcaggccatagctggtcatcacatccagcacgaagcgagtcaccccttcatagccagcgcccggcatcaataccatcgctttacccggcagcgagcagccgccgccagccatataggtgtagatgctgcactggtcggaattcggaacgatctcccagaataccgtcggcgtccctttgccgacgtttttgccggtgttgtattcatcaaaggtctccacgctgttatgacgcagcggggagtcgatggtagctttgattaccgattcgcgcagcagcgcttccagctcgccgatcagcgggaagttggcgccgcactccactagaaactggatcacgccggtgtcctggcaggaaggacgatccagttctttcgccagacgttggttttcaatcatggtggtaaagatcacatcggccagttgactggtctctttcttatgcagatcttgcagctttgccgtgacgtcatcaggcaatactttgccggtatatcccacgaacctggccataatgtcggtcatgcgggatatctgttcacttttgctcataaaggctccttagtcagaacagcgtccgtaaattacggatgaaaagggaaaaggattggcagcaggatcaggctgacaatggtagaaacgataattagaggaatgccggatttggcgtaatcgacgaacttatagcccccggccgacagcaccatcatgttggcaggcatcccgatcggcgtcgcataggcgcaggagctaccgattaccgtcgccatcagtaccgcacgcggatcggcgcccataccggcggcaatcgacaaactcaccggcaccagcaacgcgacggtggcggtattagacataaagttggtcatcaccacggagagggcaaagaccactaccagcagcataaacggtgaggagttattacccagcaggccgataacctgatcggcaaccagcttacccgcaccggtcatttccagcgctttagccagcgccagggtgcctccgaagataaaaatagtttgcgaatcaatggctttataagcctgtttttccgtcaacacgccggtgatgaccagcaccagggcaccaatgcagccggctacagtcagactaataccggtctgtttttcgaaaatcatgccgaggatcgtggcgatcagcaccaccagggacaggatctgcttccagcgcggaacgtggctgtaatcccgctgttcgccaatgctgcccacctcactactgttcgagttattaggcagaaacttatagccgatggttaggaaatagaggatgccgcagaccagcatcggcaggcccactttcgcatactcaaagaaaccgaagccgctgccgatattctgcaaggccgattgcgcgatcaagttaccgggggcgccaatcagcgacaggttgccgccaagcgcggcagcaaacaccagcggcatcagcagacgcgaacgggtgaatcccgatttggcggctacaccgataacgaccgggatcaaaacggctgccgtaccggtattggagagaaaaccggacattacgccaaccaccaccctaatgatgaagatcagctgcttctccgttttggcgaagtgggtgatcacgccaccgactttgtttgccatcccggtttcaaataacgccccgccaacgatgaacatggcgacaaaaagaatgacgttgctgtcgataaaaccggcaaacgcctgcttgagatccaatacaccggtgagcactaacgccacacaaaccaccatggaagtcactgccagtggcactttctcccagacaaacatgatgatagcgaacaccagcaaacatagggtgatggtaataggttccatacttataatttttcctatcaatgatatatgatattgtatccaatattgacgaaggagaaattattcccatgcaaaaagtaagtcaatgcgtttttgcggaatgatcgcgcaatgagatctgcatcaagatcctgtgcagatcgtcacgaaaagtaactaatagcgcagataaatgtaagaaaagccagcctgtcgctggcggaggagcccttcaggtggtggtatcgggcaggtatcgagtgagcatattttccatcgagcgaataatatgttcatgcattcgctggcgggccagtgcttcgttatgttgctcaagcgcttgtaaaatcgctttatgttcgcgaattgagataacggcatactcttcttcggtgactttatgtcccatcgacaggccgttccacatgttgcagagtagcatcttcattttttcattgcccgccgcgctccagatctccatatggaaagcctggttcaggtcggaatattcagcagaattattgtctgccagcgccttctctgcggcatagtgaacctgggcgatgcgtgaaatatcggtccctggacgagaagctttcgccacggcttcactttccagtacggcgcgaatttcataatgttcgcggatggtctgctcattaatccccagcaccaccgcgcctttattcggccgcacttgaatcagaccgtcggcggctaaaatttgaaacgcttcgcgtaccggcatgctggaaacgccaaccagtcgggcaatcccttcaagggtaatctcctgcccttccactaaatcccgcgacaggatcgctttacgcaacaccgccgccacctgctccttcgcggaaagaagcttaattttccctaatttaggcttctgcactttcccaatccttcatatgttgacgcataatttccgcaagcataaggaaataacgctgcgttgtctgggcaatttttccgccttcgccattgccgatggcgttggccagttcgctcagtatcagagccgattcctggccattctctttcagataaagaatgacataagaaatataaccgtccaaaaattgctgatacgccttcgccaggtagcgattatcaagataggaaatcagcagctgatggaacgccagttcgcgcgtattctctcccggacgcgccagctcctgcgcgcgtgcgcgcagcacttccccctgattcgccggcacaagggcaaagagttcggcggccatcaccgcaataacgcgaaaaatatggctcacatcctccacggccaaggtggagacctgcatatgccggttaggcaagcgcaccagaaacccttcctgctcaagagattgcagcgcttccctaaccggcatacgtgaaagtcccagctgttccgcgatgctctcttgcgtcagctcatccccagccttcatcgcaccggaaaggatctggtagcgaatcatctgcgcgatttggtcccgggtctgctttctttcaatctttttcacgctgtcctcatggctggtggcttaaaacgcggggattttagcagatttgcccggcagcaggcgcattggggcgaaaagtgaggtaataaaaagccggaacagcggttccggctcttctgttagggcgagattacttgttgacgaagtcttcgccgagcgcgatatctttcttcagggtgtccagcatgccctccagcgcctgctgttcaaaggcgctgagtttgccgatagactgtcgctcttccacgccgtttttccccagcagcagcggctgggagaagaaacgcgcatagtggccgtcgccttccacgtaggcgcactccaccacgcctttttccccctgcatggcgcgaaccagagagagaccaaaacgggcagccgcctggcccatcgacaaggtcgccgacccgccgcccgctttcgcttccacgacttcagtaccggcgttctgaatacgtttagtcaggtcggcaatttcctgatcgctaaagctgacgccggggatctgcgacagtaaaggcagaatggtgaccccggagtgaccaccaatgaccgggacttccacctcggttgccgatttacctttcagctccgccacaaaggtattggaacggatgatgtccagcgtggtaacgccgaacagtttgtttttatcgtacacgccggcttttttcagtacttcggcggcgatagccacggtggtattcaccgggttggtgataatgccgatgcaggcctgcgggcaggttttggcaatctgctgcacgaggttcttcacgatacccgcattcacattaaacaggtcggaacgatccatgccgggcttacgcgccacgcccgcggagatcagcactacatccgcgccttccagcgccggagtagcgtcttcaccggaaaatcctttaatttttacatctgtggggatatgacttagatctaccgccacgcccggcgtaaccggagcgatgtcgtacaacgagagctctgaacctgaaggcagttgggtcttaagtagtagggcaagcgcctggccgataccaccggcagcgccaaggactgcaactttcatcctaaactccttattatggttaatttagtctttcgttattccgtcgcctggaccttaattcacaagatgaacaattacaatgattatggctgaagaatgcattattgtgcgtagcaatagaacagcggcgcactttatgcttcctgactgaccatccagcaaagcgaagtaccggatcgactattggttacaatacacccagccagttgcgcaaaacaacaccaactcaataacatttcatttacttttacatggctttaagcgttgtgatgagaacatgttccttatacggtttttttgctaaaatatgcccccttcataacattattgacctatcctttcgcggattatttgcataaaaattcatggttatgcataatgatgttgattttaccaccataatctgggtgacttatgcgaagttcggcaaaacaagaagaactggttaaagcgtttaaagcgctgcttaaagaagaaaaattcagctcgcagggagagatcgtccaggcgctgcaggaagagggcttcgagaatatcaaccaatcgaaggtttcccgcatgctcaccaaatttggcgcggtacgtacccgtaacgccaaaatggaaatggtctattgcttgcctgccgagcttggggtaccgaccacctccagcccgctgaagaatttggtgctggatatcgactataacgatgccgtagtggtgattcataccagccccggcgccgcgcagctgatcgcccgtcttctcgactcgctgggcaaagcggaaggcattcttggcagtatcgccggggatgacaccatctttaccacgcctgcgcgcggttttacggtgaaagatctgcacgacgccattctggttctgtttgagcaggaactctgagtaattcccctctggctaccgtcagagggcgactcccttttctttttcctctccccccttccggcacaacaactatttaacacttagtgtcatttacgccgtctatacgttcttttactaacgcgaaaatcgtaaaacgcacaaaagatcaaattcgtatacctttatgaatttattagaaataaatcttatcgctgtcgctaacgtgtcatttttaattcttatccgttataaaaagcgcaatctattgtaactattaacgcacaaaacaattagcatggtattaatatttttggtgattagtgtatacttggttttgtgatgagggtcacgaaacaaagacccccaacaaaaagattcgacgaggtgaacatcatgaaaatcaaaaccactgtagctgctatcagcatcctgtccgtcgtgtcgtttggcgctttcgccgctgatattatcaacagcgagcaggcccagggccgcgaggccatcggcacggtttccgtcggcgcggtagcatcttccccgatggatatgcatgaaatgctgaacaaaaagcgcaggaagaaggggcttcttcttaccgcattattgaagcccgcactggcgaccactggcatgccactgctgagctgtataaataagttttagacgtcaacgattaacctgacaaaaattctctaccgcggcccggcgacatacatcgccccgccgcggcaaaacaaagactggagtaaagattatgaaacgcgcaatgatcatcgcatcccttggcctggcttcccttctctctttcggtgccagcgcggctgtccagcaagtgaacgcagaacaagcccaaaatctgcaatccatgggcaccatctccgtatcccaggtaggtagtgcgccaatggacatgcgtcaggaactggcggctaaagccgagaaagaaggcgccagcagctaccgtattattgaagcacgtaccggcgatagctggcacgccaccgctgagctgtacaaataaaccctcgtcgtcttatttcgacgacttgcccccgcctgccgggggcttttttatgcttgtcgggcattaaaacgcaactccccctccagctcttcctctgcttcatcaaacaataaaatcaatgcgccaaagcgccggcgctgcttgtcatttaaatggatgaactcaatatccagcggcagcggtagcaggccaccggtcactgcgtcccatagcgaatccaggttgttgaccttatcctgagccagctcgaaggttcgggaaaactcccggtagaaatcctgttgttcggcgatttcgtcaaaatcaaacgtataggtggtcatgacagcccctcccgcttctctttctgtcgccgttaagtatagcgataaaaaaaccgacgcctgggcgtcggtttatgggttagctgctggtcagcacatgctggtacttatgcagcatctcaaccagtcgccgtaccggctcggtaacctgcggcgaggcctcccagactcgcagcttctcctgatagacatcaagctccgccagcaactgggtaaaatagcgccgacgcttatcatcgctgccggcggagatcacatggtccgcggttcgtcgcagctgacgatggaaggcggagagatcgtcattcaccggcacgggcgcatcgcgcaagcgctgatgggcgatgattaacgtcaacgccagacggaaacgggcgacgtcacctgggaatttattgagtaataaaaacagctgctgatagagcgcgggcagatgattttctttgcgacgcgccgagttggtggtcagcgaagagaccgctgcggagacaaactggttcagcagcacccgaccggttctggcccgggagttatccctgacaataagaataaccatcagagcgaggaaacagccgacgatctgccccagcgcgctatcgaggaactggctgaactggaactgcatcggattatccagcaccagaatgttgatggtgctcgccagcgcccccagcgatccgagacgccttttctgcacttcgatcccgataaagaacgccatcgccgccaggctgatgcaaagcaacagcatgctctgctgcgtcgccggcatgatcaccaggaagtacaaggtgcccaacggtaacgccgccagggtgccatagaggaagtctatcgccaccattcggggattcggcaggcgcatcgccagcgcggtaaccacggcgatcattaccatcgcgccgctgcctgaggtccagcccgtccacagccagaatagcgttccgagaatacaggagacagaggtgcgccagaagttcaccatcgcgtgatgacgttcggcggactccactttaaccaccgtttcgccgcgcaacacgccatcctcgatacggctgattttagtattccccaccacgccgcgcttaagcagcaggtaacgcgtggcggcgcccacccagctatatatcgtgaccggggtattatgctcgcctttccaggtcaggaagcggcgcatgcgcttcagctgctggtgaacatcctgcaccgtctcaaccggctcggcgaacagctcgcgatagtcgtccgtgaccatttccgggcgtgagttctgaatcagataggtttcgcaagcctgggtgataagggttagcgaaagggtgttgatcgccttcaggcgctgattcgcctttgcccagcgtgaggattccataatcaggttactacgcataccttccagcgccgtagtgcggcgtaccagcgctccccaggcttgatccacttcctctttttcaccgtgcgcgacgcataactgcatcagcttatactgggcaattagcaggttatcgagctcgaggtcgatctcttttttaatcgaacgcggcgaaaacaggagatcggcgacgatggcgctgacaataccgatgacaatttcgctgcagcgttcgacagcaaactgcggcgccagcatcggattggtatggatggtaataatgataatcagcgcggtgtacccggccagcccccaggcataggagttttcgaccttgaccagcgacgaaacccaggtacaaaaaccggcccacagacagcagaccagcatcatcaacagaggcgcgcggatcatcaggatgatgataaccagcgccgcaatacagccaataaaggtcccggcaatacgcaacataccgcgatagcggatcgcgccggagtacggttcgccgccagcagcaaaggccggcccggcggcgacgatcgctgccgtcagtaccgcccagcgcggcgtttcgagctgaaaatggaaaccgacaaacagcgccagcaccaccgcgcatgcaagcttaatggcaaagcggagatgccggggagcaatggtatatgtccccatagcgattaaccaaattcgcgcaggcgcatagccagtttctggaagaagttggcctggctggtatcacgatcttcttgaccggtgatcactaccgtcgccgtggtgcccgatggccacagattcccctgctggtgatcgaggcgaatacgcaccggcacacgctgcgccagacgcacccactcaaggttggagtcgaccgaggccatccctttcgagtcgctgctgctgctggcgttggtcacccccgcagcgatactgtccaccgtccctttaatggttttgctgctgcccagcggggtaatctccgcacgatagcctggacggacgccctccagtttggtctcttccagataggccatgacgtaaaacgtattctctttcaccagcgccaccgccgtggagccacgggtgataaattccccagtgtagacgttaaggttagtcacccagccatccgcaggggcgcgaatgaccgtccgctccagatctagcctggccaggtcgcgactagccaccgctttcgccagctgatgttcaacggtttgcagtacgttgttcgcctgatcaatctcttcccgcgacatcgcctgtacgccaagcttattacgccgaccggcttcgacgcgtttttcctgagctaacgtctgataataggcgacatcagcttccgcctgcgccagcgctttttggtaacgaggttggtcaataacgaacaatacctggtctttcttaaccagttggttatccttgacgtttacctgagaaatcagcccggagacgtcgggggcaatcgccacaatgtcggcgctaaagcgcgcatcacgcgtccacggcgaggcggtgtaataaacccaggcgcggaaaatcgccacgaaggccagaatgaccagtatcacggtaatggcagtacggaggatatttcttgttagtgttttcacatcaacctcaaacgaacaagcgcgatatcaaataaaaaaggcagcaatagagcgccgtattaaacagtgctgggtgccagacaaaatcgtaaatgccggtcggaaccagcagtcggtgcaccagccaaaagatagccagcgacaaaagcaactcgaagaagatcggcggaaacgataagccgaaaatcacgatgacaggaaacagactcatgatgaccttgaataagaagcgtacaggtagtgagcagatgcgtttattatgtagctaacaatatattaacgtaacgattgccgcattatctacaatgtgtgatctaaatcacttttaagccagagtgaataatggaacgattaaaacgcatgtccgttttcgccaaagtggtcgaattaggttcattcaccgcagcggcccgccagcttcagatgagcgtttcctcgatcagtcagaccgtcgccaaactggaagatgagctgcaggtaaagctgctcaaccgcagcacccgcagccttggcttaactgaagcaggtaaaatctattaccagggctgccgtaggatgctgtttgaagcgcaggatgtccatgagcaattatacgcatttaacaatacccccatcgggacgctgcgcatcggctgctcttcaactatggcacagaatgttctggcgcgcataacggcgaaaatgctcaaagaataccccgggctctctgttaatctggtcaccggcatacctgcgccagacctgatcgccgacggccttgacgtggtgatccgcgtgggcgccctgcaggattccagccttttttcccgccgcctgggctcaatgccgatggtattatgcgccgctaaaagctatctggcgcaggctggcaatccagagaaaccggccgaccttgccggacatgcctggctggaatatagcgtgcggccggacaatgagtttgtcattatcgcgccggaagggatctcgacccgcctgaccccgcaggggcgcttcgtgaccaacgaccctatgacgctggtgcgctggctaaccgccggggtgggtatcgcctatgtaccgttaatgtgggcgatcgaagagatcaaccgcggtgagcttgagatcctgctacccagctatcagtccgatccgcgaccggtctacgccctgtatacggaaaaggataaactgccgctgaaagtgcaggtctgtatcaactatctgacggagtattttgtcgacgtggcgaagatctatcagggcatgcacgggcgcgggatcgcccggtgaagcggttcccggcagcgccgggaaccaggtcaggatcaggcggtgccgccgacggtaaggttatcgaccttcagggtcggctggccgacgcccaccggcacgctctggccctctttgccacagacgccgacgccgttatccagacgcaggtcgttgcccaccatcgaaatctgctgcatggtctcaatgccggagccaatcagcgtggcccctttcaccgccttcgtgaccttccctttttcgatcagataggcctcggaagtggagaagacgaatttaccggaggtgatatccacctgcccgccgccgaagttaggcgcaaagataccgtagtcgaccgattcgataatctcctgtggcgttgactggcccgccagcatataggtgttggtcatacgcggcatcggcagatgggcatacgactcacgtcggccattgccggtcggtgcgacgcccatcaggcgcgcgttgagtttatcctgcatatagcctttcagaatgccgttttcgattagcacgttgtattgccccggcgtcccttcgtcatcaatggccaccgagccacggcgatcggcgatggtgccgtcatccactacggtgcacagctcagaggcgactaattcccccatatggccgctaaagaccgaggtgccacgccggttgaaatcgccttccagcccatggccgaccgcttcatgcagcaggacgccaggccagccggcgccgagcaccaccggcagcatccccgcaggggcggcgaccgccgagaggttgaccagcgccatgcgcaccgcttctttcgcccaggcatcagcccgcacgtcgccctcctgggaggcgaggaaatagtcataaccaaaacgcccgccaccgccgctgctgccgcgctcacgcttgccatcctcttccaccagcacgctgacggaaagacgaaccagcggacgaacgtcggcggccagagtgccatcggtggcggcgaccaggatcagctcatacaccccgctcaggctggctgaaacctcctgcacccgctggtccgccgcccgggcgactttgtctacccggcgcagaatatccagcttctcttcccgggtcatactctgcagcgggtcgatgctggtgtacagggcacgatgctctacggcgccgagggtctgcactttgccattgccggtgtcgcgcacaatggtccgcgccgcctgggcgctctgctccagcgccagtttgctgatctgatcggcgtaggcaaagcccgttttttcgccgctgacggcgcgcacgcctacgccctggtcgatattgtacgacccatctttaatgatgctgtcttccagaacccaggattcgtgatagctcgactgaaaatagagatcgccgtaatcgaggcggcgctcggtcagttgaccaagaatggcaaacaggtcctgatgattcaggccatttgccgacagtaattgttcacttaccaggttcagactcatcgttatgctactcgtttgttgccgcctgacaggcggaaatacagaaggctatctattgagattgcggcaattcccggcaatcgtcaaatcattgctttttattgctgcgcgcctggcgcagcacttcattgatctgcggctggtcaatcgggccggtgatgcggtagcgcagaatcgaaactttattccacagcggacccagcactttgctggcggcaaataccgccgcgccgacgatggggttgacggcaaaggccgccgccacgccgacggtcgcggagatctccggcgccaccaccgcctgcagatccagctggcgacgcaccagatcgaccgaccctttcatagcaatatccgcttcaaggccatctaccagcgtatcatcggtatgcagtacgccatccttaatccatgccgtactgttaatcgaatcgaagtaaaagccttcgctgaaggtatcgctgaaatcgaaacgcagtttacgcagcagggcatccacactcagcagacgcagcagctggccagcgtgcccggtactcaggtcggtaaactgccccttgcccaggtggcttttaatgatgccattgagcgacgcgacatcgggtgaccagggcggcgcgcgccagtgcagatcgtagtcgatatcaaacggcgaatccttcaccggcgtggagacgccaaagaaatccgcaaatgtatccgtcttattgccgtgcagtctgcctttcagcgaggttcgaacccctgaaggggcgttcacccacacgccgttggtcgtcagccggccaaacccggtatccaccaggccgttggagagcgttaaggtatcccctttgatcgccacatccccatcgatgcggccatatttttgtccccacagccagcattccgcgcagcgtagctgcagatcgggccagccatggaaatccagccgcgtcgccgtctggggggccacattctctgttgcgttctggccgctggcgctggccggattgaaatagagataacgcacatttgccagccacggagcattgtcgcgcatcgtcaatgtggcattgatctcacgcccctgcgcctcaacctgcgagccgccggcgaccggctgtgacatcagactgacgttgttccactgttgacccgcgagggccagcgacggcgtacgcagcacaatgcgcggtggaaagagcacgctgctgctcacttcatttgccgcgccgttctcgaagagcgccagccactgcgcgccatccatcggcggcagattgagctcgataccggactgatcgggcagcggagagtaccctttgctgtcagtggtaaggatcgctctatccagcgtcagcttatgattgagcaaccagcggctgttaatatgattcttcgccccgatggagccggtcaggtcgaagctgctcaggccgccggcaacgttaattttgaccggaaggggttcgccggcgggcttactgactggcgaaggtaagcgactgctcacattcttcagatcgccgttgatatcgaccttatagctggcattgccatggtacggcagttcgatggcgaccttgccatcccacgggacgctaccgctcaacgcctcactcacggctttcggcagcagcccggtgcgcgacggctgccagttggcattcatcccgacatccaccagaaacgctttttcaccttcgcgggtggaaaaattgaggttcagcggctgattaaaccaggtcgcgctcaacgtttgactattgagatcgccattcacaaagctgaaattaccgctcaggttctgcagcgtagtatctaacggtttgataaacaggctattattctgcaggcgcacatcgcctttcgcggtggtcatctcgccgtcgagggggatattaagatgtaagcgagcgctcacatccccatccagctgcagggaatccagcgccgccccgagcgactctttcagcggcgtagtattaaagtaaggtccaacctctttgcccgggcctttgatatcggcatcaatcagcagtttttcctgcgcatagtccgggatcgcggcatcgagattgctggcggtcacgttgccaagcatcgctttatccgcccgcatccacaggccgttgttgataaaattgaggtcgatgttcagcccggttaacgccggccagtccggttggaaggcaaaagtggcgttcttcagcggaacataaacctggaactggccttcattatgcggataagggaatagatgcggattgccgccatacaccagcgtcgcatcgctggcttgccccgctttaatcgcgccgctgagatagtccaccagcgctttgcccatcagattttccgggaaataacgccatgcctggccaccgtcattggtgctgatgcccgccagaatgcccagccagggatcgtccccctgcggttgcagatagcggaagccgccgcgggcgcgtacgcctgtcgcctgcacgtctatatcgcggccatcaagcataaaccctttgtcgtttttcacccaactgagcgtggcttcgccagcggctatctccagcggcgcgcggaagacgccggcatacggcatcagcgccttcgccatatgggcgcgtaattccccgtgctcaacgctgccattcagactgccggagaagtgctctgccccaggcaggagtttccactgcttccacgccagatcgctccactgcgcctgaaaacgcgttttctccgtcgcctgcagggggatatcgagagccagcaaattgattttgccgccaggctgcgtggtacgccagagttcgcccagagaaggcgccagcttatcagcaaacggctgtaacccgctcaggccgctgagggccaaattgctggcgcgaatacgtaactcatcgctacgctgacgatcgtcgccaccaacgtcctgcgccgggatccacgccatcgccagggctccgcttggccagggtttatcatcgatagcgatccgcgtatcgggaatataaaaggcccagctttgcttatcatgggagagatgcgccgtcaggttatccaccgacaaatgatggacttcgttatcgccctgccagctggcgcccccttttttcagccatacgtcgccgctggccacatcgcctttttcaatggtcatccagccttcgaggctgaagcgggcgcttttcagggcgatattgtcctgcatccagcgtcccagccacggtttgacgtcgatatcatccgcctgcagccagacccggcctttattcagcaggccatcctcatcgcgaagatccatccgcacctgcatgacgccatgctggccggtgaggctggagaggctgagctgcccctcggcgcgatgacggttcctgccgttaagccatgtcagctgcggaaccgccagctccgcccgctgaccggaaagggtcaggaagctcagatggctgtcgcgcagagtaaagtgatcgaactgacgtaaaaagagatcgctgatgcggtcggttttcaggctttcgccaccgtcattggtctgaataggggtattggtatggacctgcagctgccagaaggtgaggtcgcggaactgccagcgcatatgcagcaggctctgccagacatccagcgccagggttacgcgcttgaccgccattgtgccgccatctttcagcccgacatggatatcgcgggcgtctaacgtcggaccaaaagtctgccagctggcggtgatctgcgaggcgtccaccggcgtaccggtgagggtggagatcttctccagcagctgcggacgccaggcgtcgagctgtggcaacacgagacgcaagccactcaccagcagcgcgacgataacaatcaatgttgccacggtgagcaataaaatcccgggcagtcgcctcacgcctctctccttgtcagccgcacaatgacgcggtgtcttacatcataaccacatcgaactgctcttgattatagagcggctcaatttgtaccttcacctgtttgccgacaaagatttccacttccgccagcgcatgcgactcttcccctttcagggtttccgccaccgcaggggaagcatagaccaggaagcgatcggaatcataagcatgatgtacgcggacgatctcacgcataatctcatagcacaccgtttccaccgactttaccgttccacgtccgtggcaggttgggcactcgttgcacagcacatgctccacgctttcacgggtgcgtttacgggtcatctccaccaggcccagctgggagaagccgttaatgctggtcttcacccgatctttactcagcgcctgctctaaagagtgcaacacccgtcgacggtgatcttcattgttcatgtctatgaaatcaatgatgataatgccgccgagattacgcaaacgtagctggcgggctatcgcctgggtggcttcgatgttggtattgaagatcgtatcgtcaagattgcggtgcccgacaaaggccccggtgttgatatcgatggtggtcatcgcctcggtctggtcgatgatcagatagccccccgatttgagctcgactttacgctccagcgcgcgctgaatttcgttctcaacgtcaaagagatcgaatatcggctgacggccgctgtagtgttccagcttgctggtcatttccgggatatattcggcggtgaattcgagcaacgcctcataggtcaggcgcgagtcgacgcgaatgcgatccagttgcgcatcggcaaaatcacgcagcacgcgctgggccagagccagctcgccatacagctgatagcgggtctggttgcgctttttgcgctccatcaccttggtccatacgcgcttaagataagcggcatcggcggccatctcctgctcgtgaacgccttccgcagcggtgcgaatgataaacccgccctgctcatcgcaatattctgcgacgaccttttttaggcgctcgcgctcggcttcgctttcaatccgctgagagacccccacgtgggaggcgcctggcataaagaccagatagcgggaaggcagggtaatatcggtggtcagacgcgcgcctttggtacccagcggatctttaaccacctggaccatcaggtcctggccctggcgcaccagctccgaaatatcgcgcacggtaaactgcttttgctcctcaccggcgacgcactcggtatgcggcatgatatcggaggcgtgaaggaacgccgccttatccagaccaatatctacaaaagccgcctgcattcccggcagcactcggctaacacgacctttgtagatattgcctactattccgcgtcgcgcttcacgctcaatatggatttcctgcagaataccgccatcaatatacgcaacgcgcgtttcggatggcgttacgttaactaataattcagccgtcatctttatccctttcctttacgcagtgagttaaagttactgagcaactcatacgtttccaccagcggtaagccgactacggcgtgatagctgccattaatcttcctgacgaagcaaccacccaacccttgaataccgtatgcacctgctttatctaaaggctcgccgctggccacataatcggcgatatcctgctcgctgagccgccggaaggtcacttccgtgaccaccagacagtccagcgtttgctgcttatccgccagcgccaccgcggtcatgacctgatgggtgtggccggaaagcaaacgcagcatcgctgcagcgtgttcggcgtcgcgcggtttttccagcacttcgccgttcaaaatgacaatcgtatccgctcccagcaccggcaaatcgcgggtggccatcgccaccccggcctgcgctttttcgcgcgccaggcggacgacatagtgctgggcgctctcctgcggctggcgctgctcctcaataccaggaaccagacgctcgaaagcgagaccaagctgagtcagcagttcctgccgacgcggggaaccagaagcgagatacagagttgtcatatcaaccttattgcactgcaaattgctgacgcactttacgcatcagcaggaagagccatggccagaggataccgtttactacactactccagaatacttccggacggaaagagacgttgatcactaaaaactctgcccagaaaacaatgatatccacggccagggataacagcattaccaccagcgcctgctgccacagcgccaggttacggaacagctgatacttcagcgcgaccagataggcgacgatgcttaaagacagcgcgcgaacgccgagcgttgaaccgctgatgagatcaagaatagcccccatcacgaaacccgtccccacgtttacccggtgcggcaacgcgaggatccagtacagcaggatcaataatacccagttgggccggaaaacgctgatgtccgccggccagggcataatttgcagcaatagcgcgataagaaacgagagccagataacccagcgtccctggctacggtaacttgccactattgcccccctgcaggctgcgacggctgaggcggcgtcaacccggtggcgggcgccggcatctgcggccccatcgcatccggcgcaggcagtacctgcggcatcatctgcatcagacgttcgttagccacccgatgaacctcttccggggtcatcgggttagcgccattacgatcggcgccccacagcagcaacagatagcgcaagcgctgcagcccggccgtcggacgcgcctgaatcacggtataggcgcgctgggtgtccagtttcaccgaggagactaccccgaccggatacccttcagggaaacgaccgccgagaccggaggtcaccagcacgtcgccgacgcgaatatcggtatttgccggcagatgctcaagctggagatcgtccgtgcagccgttaccggcggcaatgacgcgaatgtcgttacgcagaacctggatcggcagcgcatgagtggcatcgcagatcagcagcacccggctggtcattttcgccacggccacgacctgccccacgacgcctttatcgctgataaccggctggccttcatagacgccgttcacgctgcctttgtcaataaccacctgatcgctgtaagggtcgttgaccgttgagatgacctgcgtcaccattttttgctcgtcctggcgcagcggcgagccaagcagttcacgcaggcgcgcgttctcctgcttgtactggcccagcatcagcagatcgctgtttttcagcaacagctcctggcgcagcgcacggttttccagttcgagctggtcgcgggtagctagcgtctgcgatacgctgtcgagcagttcccggggaccattagagacaaagtagaaagggctgacggctgtatccatgtacgttctgatttgactgaacgtacccaggcggctgtcggcgataatcacgccaagcgccaccagcaccgccagaataaggcgaatctgtagcgaggggccacggctaaaaattggcttcataggctatgcgtattctcgtgtcagtaaagaccaggggcagctcgtatgccgccccggaccttcaggctgactactcttcgctaaacaggtcgccgccgtgcatgtcgatcatctccagcgccttgccgccgccacgcgctacgcaggtcagcggatcttcagcaaccacgactggaataccggtttcttccattaacagacggtccaggttgcgcagcagcgcaccaccgccggtgagaaccatcccgcgttcagagatatcagacgccagttccggcgggcactgctcaagggcaaccatgaccgcgctcacgatgccggtcagaggctcctgcagcgcttcaagaatttcgtttgagttcagggtgaagccgcgtggcacgccttccgccaggttacgaccgcgcacttcaatttcgcgcacttcatcgcccgggtaagccgaaccgatttcatgcttgatacgttcagcggtcgcttcaccgatcagggagccgtagttacgacgcacgtaattgataacggcttcgtcgaagcggtcaccgccgatacgtacagaagaggaatagaccacgccgttcagggagataaccgccacctcagtggtaccgccaccgatatccaccaccatggagccggtcgcttcagaaaccggtaagcctgcgccaatcgctgccgccatcggctcttcgatcaggaagacttcacgggcgcctgcgccctgcgcggattcacgaatagcgcgacgttcgacctgggttgcgccaaccggtacacacaccagcacgcgcgggctcgggcgcataaagctgttgctgtgcacttgtttgataaagtgctgcagcatcttttccgtcacgaagaagtcagcgataacgccgtccttcatcgggcgaatcgccgcgatattacccggggtacggccgagcatctgcttcgcttcatgacccacggcggcgacgcttttcggcgatccggcacgatcctgacgaatggccaccacggaaggctcattcaatacgatgccttgtccttttacgtaaataagggtattcgcggtacccaggtcaatggacaggtcattggaaaacatgccacgaaatttttttaacatactaagggataatcctgaaagctggggcggaaaacaaaatccgcttactttaccaaccacacgcagcagcgacaaggcgcaaaaatcacctgctgcggtgaaaattagtgcagttcatttcctttgttacaaattttcccgactccgttcattgctgaaatcttcagcagcgctccacgcctgaatttgtaacctgtcaaaggagggtcactggcatttacattgcgatgatccggcaggtagacaagcacacccccttcacgatggcgcgcgttattctacgtgaaatcacgctaaacggcagatcaaaccgagtatctttgcgaatattttttcacatttgtgtcaagtggctgtgaggcggcaaaaaattccccctgcccgcccgtgacaccgcattgggacagtaccaaccactcgctgcggctgcgtacgcccgtcgcaaaaacttgcataggcatgcctttacaggcttccaccaggctttgcaccagcagttggttctcgctgcgcttttcgatgttgcgcgccagacccggatgcagtttgatcagctccgcatccagctgcttgatccagctggttccaaccagggttaaccccgcctgaaccactgccacccgaacgcccagagcgttaaccaatcgcataaccggctgcagacggccgatatattgacaaacatctgcctctgcaagttcaaaaataatccgctgacgctgcgatttttcacactgcatcaaggcatcgcgcagccagcgctggaaacgcggacggatcagcgactccaccgacagttggagcgccagattctcctcgggccagaagcctaaaaacggcagcaggcgcgttacctgcaggcggtcatactcctccgccaggccaaactgcagcaccatcggcatgtattccgctgcaatcacctcttctttaccgtcgtacatccgcgacatcagttcacgatgatgtacccgcccgtcgcgggtgacagctggtttttggtacaaccgcggcccgccgcggctcagcatctgttcgatcagcgttcgccagcgaacgttgccgcgacctttctccggaagggtgtcatcatagaccgaccagctgttgctgccctgcagcaccgcgttgcgcgtcgccgcttccgcatgttccatcacctgcgccgccgattgcccgctgcggaaagaacagatgccgatatgcatcatatcgtcgcgatcgaggatacgcgttggaggcagcgcatccatcgccttcagcaacaggccggcgatactatccgcctctttcaacgtacggtgcggcagcagcacggcgaagtcgctacggtgatagcgcgccaacagcgcgccggggtaacgcataataaaggtagagagcaggttgataagcgtaaagtaatgttcttcggccgccgcccgtccccagttgtcccgtagcagatcaaactccggcagacggatcatcatcacgatgccgtaggctcccaccttcttctggtcttccagcagcgtggccagctgattgtcaaaaaacaggcggttattcagtccggttttcgaatcctgcgccgcgtaggagcgaataagcgtatccatccggctgcgctgatcgctggcgaactgcagctccgacagcagcatatccagcgcgctactggtgctggccggccattcatagaccgacccgcgcacctgcggcccgcgctcgccgctcaggatacgcgtggaacgcagctccagcagctcctggccggccagctggcggcggatccagcggacggcgaagaaaataatcaccaccatgaagccaatggagatcgacagcggggcagtgatcgacagcgaacggaaatagttcaccatcgggtcaacgtagaccagatgcagcgtaatgccaggatgtttaagcgacggaaccgtgatctcacggaattgctcatggctgccgagcgggcgatagctatcgggtcgggaatggctgtagagcggtttgccgttgagcatgaaatcgatatgcacgatctcgatcggcgtcatcagctcatccaactgcggttcaagcttatcgaaagaggtggtgatgagccggttatccagcatggtcgccaccgcctgaacgcggttttcgaccttgttctcaatgccgttataaaaactcagcgaagcgccaatcagcgtgacaaagatggtcaggctagttagcagcgtaataaaggctgagaacttcgtcgttaatcgcatccctgtgttaactccgcgagtgaatgactacccgatgaaccatcaggctcccgtgccggcgcgcgccttgccgcaagcattaaccttttaaagcgcgacgcatactatcaaagatggcgagtctggcaatggaatgcgtattatcggtaaaagtatgccgatagcgagtatagtttgcagaaaaaatttgccaatcgtcgcccgcctgcggcctgcgccagaagcgctttaattttagacgcaggatggcaaacccgcgccggcgacgcaaattattaccggtttaccgtctggccagcttgccgcccccttttccctgctaaagatgccgggtcatgcgcggcaaaggaaacgtcttgcgccactttccgatgattcctggacgaccgcgcctctgcttcggcggcggctcctcatcctaatgtgcaatttttcgtgacatattcgccattcatcgccgtctccgtcatgcttaggaaaacgcatgacggaggacaccatgaaaagaaaaaaactgacggaagccgacgtcacggccgaatccgtttttatgctcaagcggcgccagatgctgaaaatgctgggcatcagcgcgaccgcgctttcccttcccgccgccgcgcaggccgacctgctggactggtttaaaggccacgaccgcccaccagcgccagcgggcaaggccctggagtttgctaaacccgccgagtggcaggctaatttgacgcttaccccggaagataaggtcgccggttacaataatttttatgaattcggcctcgataaagccgatccggcggcgaacgcgggtagcctgcgcaccgatccctggacgctcaccatcggtggcgaagtggcgaaacctctgacccttgaccatgacgatctgaccaaacgcttcccgctggaagagcgcatttatcgtatgcgctgtgtggaagcctggtcgatggtggtcccctgggtcggcttcccgctgcataaactgctggcgctggtggagcccaccagcagcgcgcgctatgtggccttcaaaaccctctatgctccggatcaaatgcccggccagaaagaccggtttatcggcggggggctcgcttacccttacgtggaggggctacggctggatgaagcgatgcacccgctgacgctactcaccgtcggggtgtatggcaaagcgctgccgccgcaaaacggcgcgccggtccgcctgaccgtgccgtggaagtacggttttaaaggcataaaatccattgttagtatcgagctgacccgcgagcggccgccaaccacctggaacctggcggcgccggacgaatacggcttcttcgccaacgtcaatccgcacgtcgatcacccccgctggtcgcaggctagcgagcggtttatcggcgccggcggcgtgctcgatgtgaagcgtcaaccgacgttgctgtttaatggctatgccgacgaagtggcgtcgctgtatcgcggcatgaatctgcgggagaacttctagtgcgtttcaccgtcaaacagatcgtctggctgaaggttttacttcaccttgcggggtttttgccgctggtctggttattctgggccgggcaccagggctactttagcgccgatccagccaaggatatccagcactttaccggcagaatggcgcttaagtttctgctggcgacgctgctggtctctccgctggcgcgctatgcgaagcagccattattgattcgcgttcgtcggctgttaggtttatggtgttttgcctgggcgacgctgcacctgaccagctataccctactggagctgggcattaacaatctggctctgctgggctcggagattatcacccgcccctatctgacattgggcatgatcagctgggcgattctgctggcgctggcggtgacctccacgcaagcgatgcagcgaaaactggggcgtcgctggcaacttttacacaacttcgtctatctggtggcgatcctcgcgccgatacactacctgtggtcagtgaagatcgtctcgccgcagcccgttgtatatgccctgctggcagcggggctattgacatggcgttacaagaagttccgccagtggtggcgcgcaatccggtaatgtgcagtttcccgcagatcctttatcaaccgcgactctttttcagatagcggttgataatcttccctgataagaccagtatttagctgccaattgctacgaaatcgttataatgtgcgactttggttttcctgacggggttttctgaccctgaaaaggtgacaagggcgcattgaaggtatatgttgttttttacccgaaaatggcaggagatcgccacacaatggcagtgaagtttcacattttgcttttgaatggtccaaacattaacatgctcggtacccgcgagcctgagaagtatggccctctcacgctggctgaaattgttaaccgtttaacatctgaagcggcggcgctgaatgtgagtctggatcacctgcagtccaacgcggagcatgcgttaatcgaccgaattcatcaggctaaagacaacgtggactatatcctgattaatccggccgcgttcacgcataccagcgtagcaatccgtgacgcgttgcttgccgtgaacatcccgtttatcgagattcacctgagcaatgtgcatgcacgcgaacccttccgccagcattcgtatctgtcagatatcgccgctggcgttatctgcggactgggggcggacggctattcatacgctttacagacggcggtaaaacgcctgtcacaatcacactaaacaaagagtacggaacccactcatggatattcgtaagattaaaaaactgatcgagctggttgaagaatcaggtatctccgaactggaaatttctgaaggcgaagagtctgttcgcatcagccgctctgcaccggccgcaagctatccggttatgcagcaggcttatgctgcgccgatgatgcagcctcaggcgcctgccgctgcggctgccgcgccagctgcagcggcagaagcgccggcgaaagcggaaatcagtggtcacatcgtacgttccccgatggttggtactttctatcgtacgccaagcccggacgcgaaagcgtttgtggaagttggccagaaagttaacgtgggcgacaccctgtgcatcgtcgaagcgatgaaaatgatgaaccagatcgaagccgacaaagccggcgtggtgaaagccattctgatcgaaagcggccaaccggtagaattcgacgagccgctggtagttatcgagtaacgaggcgaacatgctggataaaattgtcatcgctaaccgtggcgagatcgcactgcgcatcctgcgtgcctgtaaagaactgggcatcaagactgtcgctgtgcactccactgcggatcgcgatctaaaacacgtattgttagcggatgagacggtctgcatcggtccggctccgtccgtaaaaagctatctgaacattccggccattatcagcgccgctgagatcactggcgcggtagcgattcacccgggttatggcttcctctctgagaacgctaattttgctgagcaggttgagcgttccggtttcatcttcatcggcccgaaagccgacactatccgcctgatgggcgacaaagtgtccgccatcaccgccatgaagaaagctggcgttccgaccgttccaggttctgatggcccgctgggcgacgacatggacgctaaccgcgcccatgccaaacgcatcggctatccggtgatcatcaaagcctccggcggcggcggcggtcgcggtatgcgcgttgtacgtagcgacgctgaactggcgcaatccatctccatgaccaaagcggaagccaaagcggctttcaacaacgacatggtctacatggagaaatacctggaaaacccacgccacattgaaattcaggtgctggcggatggtcagggtaacgcgatctatctggctgaacgcgactgctccatgcagcgccgtcatcagaaagtggtcgaagaagcgccggcgccgggcatcaccccggaactgcgtcgctacatcggcgagcgttgcgcgaaagcctgtgtggatatcggctaccgcggggcgggtacctttgagttcctgttcgaaaacggcgagttctacttcattgaaatgaacacccgtatccaggtagagcatccggtaactgaaatgatcaccggcgttgacctgatcaaagagcagctgcgtatcgcagccggccagccgctgtccatcaagcaggatgaagtggtagttcgcggccatgcggtggaatgccgtatcaacgccgaagacccgaacaccttcctgccgagcccgggcaaaatcacccgtttccacgcgccgggtggctttggcgtgcgctgggagtcacatatttacgccggttacaccgtaccgccgtactatgactccatgatcggtaaactgatctgctacggcgaaagccgtgacgtggcgattgcccgcatgaagaatgcgctgcaggagctgatcatcgatggcatcaaaaccaacgtcgatctgcagatgcgcattatgagcgacgagaatttccagcatggtggcaccaatatccactatctggagaaaaaactcggcttgcaggaaaaataattctgctctctcagcaaaaggccgggtaaaccggccttttttctttttctctctcctcatctataccatgcggtacaatccccgctttcttcatcctcaagggacaaaaaatggacaaacgctttgttcaggcccacaaagaagcgcgctgggcgctgtggctgacccttctctaccttgccgcctggctggccgccgcctatctgccgggggtggctattggctttaccggcctgccacattggtttgaaatggcctgcctgctggtaccgctgctgttcattctgctgtgctgggcgatggtcaaactgattttccgcgatatttctctggaggacgatgatgcagtttgaggtcattattcccctgatcgcctacctggtggtggtgttcggtttatccctctacgccatgagaaaacgcgcctcaggtagctttcttaatgagtactttctcggcagccgctcgatgggcggcttcgtgctggccatgacgctaaccgccacctatatcagcgccagctcatttatcggcggacccggcgccgcctataaatacggcctgggctgggtgctgctggcgatgatccagctccccgccatctggctgtcgctgggcgtgctggggaaaaaattcgccatccttgcgcgtcgctataatgctgtcaccctcaatgacatgctgtttgcgcgctatcagagtcgcctgctggtctggctggccagcctgagtctgctggtggcctttgtcggcgccatgaccgtccagtttatcggcggcgcccgcctgctggagacggctgccggtattccttacgataccggcctgctgatcttcggggtcagcatcgcgctgtataccgcctatggcggctttcgcgccagcgtgctcaacgacacgatgcagggcatggtaatgctgatcggcacgatcgtgctgctggtgggcgtgatccacgccgccgggggggttggccatgcggtagagacgctgcagtcgatcgacgtcaagctggtgtccccgcagggcgcggaggatatcctctcgccaacctttatggcctcgttttgggtactggtctgcttcggcgttattggtctgccacataccgcagtgcgctgtatctcctacaaagacagcaaagccgtgcatcgcggcatcattatcggcaccatcgtggtggcgatcctgatgtttggcatgcatctggctggggcattaggccgggcggtgatccccgatttaaccgtgccggatctggtgatcccgacgctgatggttaaagtgcttccgccctttgccgccgggatcttccttgccgcgccgatggcggcgattatgtcgacgatcaatgcccaacttctgcaaagttccgctacgatcatcaaagatctgtacctgaactggcggccggatcaggcgactaacgaaaagcggcttaaacgcatgtccgccggcatcacgctcctgctgggggtcttgttgctgctcgcggcctggcggccgccggagatgataatctggctgaacctgctggccttcggcggcctggaagccgtcttcctgtggccgctggtgctgggcctttactgggaacgcgccaacgcggctggcgcgctgagcgccatgatcgtaggcggcgtcctgtatgccgtactggccacgctgaaagtgcagtttctgggctttcacccgatcgttcccgcgctgctgctgagtttgctggcgtttgtggcggggaaccgtttcggtcgtcccgccccacagccccccattttgactactgataaataaagagttttgctatgccatggatccaactgaaactaaataccaccggcgcgaacgctgaagatcttagcgatgcgctgatggaggccggatcggtctcgatcaccttccaggatacgcacgatacgccggtatttgagccattgcccggggaaacccgcctgtggggggataccgacgtaatcggcctgttcgatgctgaaaccgatatgaaagcggtcgttgcccaactggagcagcatccgctgctgggcgccgggttcgcgcataagatcgagcaactggaagataaagactgggaacgggaatggatggataacttccaccccatgcgcttcggggagcggctatggatctgcccaagctggcgcgatgttccggatgaaaatgccgtcaacgtgatgctcgatccgggtctggcctttggcaccggtacgcatccgacgacatccttgtgtctgcagtggctggatggactcgacctcaacggaaaaacggtgattgatttcggctgcggctccggcatcctggcgattgccgcactgaagctgggggcggcaaaagcaatcgggattgatatcgacccgcaggctattcaggccagtcgtgataacgcgcagcgtaacggcgtttctgaacgcctggagctctatcttcctcaggaccaaccggagtcgatgaaagccgacgtggtggtcgcgaatatcctggcaggcccgttacgtgagctggcgccgttaatcagcgtcctgcccgtttcaggcggtttgctggggctttccggcatccttgccagccaggcggagagcgtctgtgaagcctatgccgatctcttcgcccttgacccggtggtcgagaaggaagagtggtgccggattaccggccggaaaaactaagcgcgatgcggcctacgggccgcatttttgtttccagtagccaccaaataatgccaggaaatgagaggcagatcgcactacagagcacttttttggctacaaaaacagcgttttatatcgccatgcggccagtttatccaagaaaaatcgagaagttttatgattttataaatggacacaaattatccaccatccattaaatcaatgattaatataagtatttattcatcccttttacgctagtcccggattcattgatctgcaacagaggattgctcaaagtttggcctttcatctcgtgcaaaaaatgcgtaatatacgccgccttgcagtcacagtatggtcatttcttaactcatgcgcatcggacaccaccagctcagaaatcgcctgatcgcagcgcccatggctggcattactgacagaccattccggacgctgtgctacgagatgggagcgggtttaaccgtttccgagatgatgtcttctaacccacaggtgtgggagagcgacaagtcccgtttacggatggtgcatatcgatgagcccggtattcgtaccgtgcaaatcgccggtagcgtgccggaagagatggctgccgccgcgcggattaacgtggaaagcggcgcccagattattgatatcaatatgggatgcccggcgaaaaaggtgaatcgcaagcttgcaggttcagccctcttgcagtaccccgaccaggtgaagtcgatcctgacggcggtcgttaacgcggtggacgttcctgtgactctcaagattcgcaccggttgggaaccggaacaccgtaactgcgtagagattgcccaactggccgaagagtgtggcattcaggctctgactattcacggacgcacccgcgcctgtttgtttaacggagacgctgagtacgacagtattcgggcagttaagcagaaagtttccattccgattatcgcgaatggcgacattactgacccgcttaaagccagagctgtgctcgactatacaggggctgatgccctgatgataggccgtgcagctcagggaagaccctggatctttcgggaaatccagcattatctggacactggagagctgctgcccccgctgccgctggcagaggtgaagcgcttgctttgtgcgcacgttcgggagttgcatgacttttatggtcaggcaaaagggtaccgaatcgcgcgtaaacacgtctcctggtatcttcaggaacatgctccagatgaccagtttcggcgcacattcaacgccattgaggatgccagcgaacagctggaggcgttggaggcatacttcgaaaattttgcgtaatagaaataaagagctgacagaactatgttcgaacaacgcgtaaattctgacgtactgaccgtttctaccgttaactctcaggatcaggtaactcaaaagcccctgcgtgactcggttaaacaggcactgaagaactattttgctcaactgaacggtcaggatgtgaatgacctgtatgagctggtactggctgaagttgaacagcccctgttggacatggtgatgcaatacacccgtggtaaccagacccgcgctgctctgatgatgggcatcaaccgcggtacgctgcgtaaaaaactgaaaaaatacggcatgaactgatactagtcagttgcttgcttgatataaaaggcgctcttcggcatggggaagcgccttttttattatctgcgccaacagaactcattactgattcaccagccgtagcgcaggccctcccgataaacgcgcagcacagaccaccgccattatattatccaccagcgcaggcgcctgctgataaagatcgaagcgttgcggatcgagcagccagtttttaatcagcccggaaaaagcactgtgtaaaacaattaatatcatctcaatgtttgtttcggctggcaatatattgttacgcacgcagcactgcaggatgccgccaatgagtgaataattaaaaccaatacgttggcgaatttcgtattccgaaagcatatcactggaaaactcacagcgctgataaagaatttgcatcagagcgcgctgtcgaggattcgcagcaatatagcgcaggcctgcaataaaccgctcgcgtaaagcatttagcggctcatgttcgtactctatggcctgactgggctgaatcaaatctctaagcggcggctgctgctgccacatttcattaaacagctccgtcttactggcaaaatgccagtacaccgcgccgcgagtcactcccgccgcatcggcgatatccgtcagggtggtgttggttactccgcgcagggcgaactgctggattgcggactcaatcaggagctgccgcgtgcgctgcgcctcttcttttgtttttcttgccatacaaggccccacttcccgataagcagataatataggatattcttaattagaattaatctagcatttgccatgaagtattatttagcaaaaatgcagacaagttaatcctgatgcgaaaagagaattaattattcaagtgaatatcaccggaaaatacattcactgaaataatgtctatttatcaacttttacaattgcgataaatcgcaatactacagtgaccatttttttgtttttgcgtgccttgctgattgcttaaaaataagtatctcttacatccaacggcgtttatttgtaggatggcaaactgctttttgattccctctttctttcacagattcgccgcctgattgggtacgtaatctataaggaaccgccatgacgactcacgccagagtgacacttttatccggtttaattatctcggccttattgctaaccggttgcgataattctgacaaccagcaaccccatgcgcaggcgccgcaggtgacggtccatgtcgtgaacagcgcgccgctatcagtcaccaccgaactgccgggccgaacctctgcttttcgcgtagcggaagtccgcccccaggtgagcggtatcatcctgaagcgtaactttgttgaaggaagtgatgtcgaagcaggccagtcactctatcagatcgatccggcgacctaccaggcggcgtggaacagcgccaaaggcgatgaggccaaagccgaagccgcggccgctatcgcccatttgacggtgaaacgctacgttccactgctgggtactaaatatatcagccagcaggaatacgatcaggcagtggccaccgcccgccaggccgatgccgatgtcatcgccaccaaagctgccgtagaaacggcccgtatcaacctggcctacaccaaagtaacctcccccattagcgggcgcatcggtaaatcgagcgtcaccgaaggggcgctggtcaccaacggccagtcggatgccctggctaccgtccagcagctcgatcccatctatgttgacgtgacggagtccagtaatgacttcatgcgccttaagcaggaaagcctgcagcgcggcggtgatactaaaagcgttgagctggtcatggagaacggccaggcctatccgctcaaaggttcactgcagttttctgacgtcactgttgatgaaagtacgggctcaattactctgcgcgctatcttccctaacccgcagcatgtcctgctgccagggatgttcgtccgcgcccgcatagacgaaggcgtcgatccgcaggctatcctggtaccgcagcaaggggtgacccgcacgccgcgtggtgatgcctccgtgatgctggtgaatgacaaaaaccaggttgaaacccgggaagtggtcgcgactcaggccgttggcgataagtggcttatcaccagtgggctgaagccgggcgataaagtgattgtcagcggcttacagaaagtccgtccaggcgtcactgtcaaagcggaagcggagcgtacggcgccggccgtgcaataaggatacccagccatgtctaagttttttattcatcgaccggtcttcgcctgggtgctggccatcattatgatgattgccggcggcctggccattctgcagctgccgatagctcagtacccgacaatcgcccctcctgcggtagcgatctccgccacctaccccggtgcagatgcccagaccgtgcaggatacggtcacccaggttatcgagcagaacatgaacggcatcgacaatctgatgtatatgtcgtcgaccagcgactctgccggttcggtaaccattacgctcacctttaaatcgggtaccgatcccgatattgcccaggttcaggtgcaaaacaaactgcagctggccacgccgctgctgccccaggaagtacagcagcaggggattagcgtcgagaaatccagtagcagcttcctgttggtcgccggctttatctctgataacccgaccaccacccaggacgatatctctgactatgtcgcctccaatgtcaaagatcctattagccgcctcaacggcgtgggcgatgtgcagctgttcggcgcgcaatacgccatgcgcgtctggctggatggcaacctgctgaataaatacaacctgacgccggtggacgtcatcaatgcgctgcaggtccagaacgatcagatcgccgcgggtcagctcggcggtacgccagcgctgaaaggccaacagttgaacgcgtcaatcatcgctcagacgcggctcaaagatccgcaggagtttggcaaggtcacgctgcgggtcaatgccgatggctctgtcgtccatctgaaagacgtcgcccgcattgagctggggggagagaactataacgttgtcgccagaattaacggtaaacctgcctctggtctgggtattaagcttgcgaccggcgccaacgccctggataccgccaccgcgattaaagcgaagctggccgagctgcagccctacttccctcaggggatgaaggtggtttatccgtatgatacgacccctttcgtcaaaatctccattcacgaagtggtcaaaacgctttttgaagcaattattctcgtctttcttgtcatgtatctgttcctgcagaacatgcgcgcaacgctcattccaaccattgccgtacccgtggtgctgttgggaaccttcgcggtattgtcgatgtttggctactccatcaacacgctgacaatgtttggcatggtgttggcgataggtctgctggtcgatgacgctatcgtagtagtggaaaacgtcgaacgtgtgatggttgaggagaagctctcgccaaaagaagcgacggaaaaatctatgtcgcagatccagggagcgctggtgggtatcgccatggtgctctccgcagtatttgtcccgatggcctttttcggcggctcaaccggcgcgatttatcgtcagttttcaatcaccatcgtctccgccatggcgctctccgtgctggttgcgctggtactgactccggcgctctgcgccacgttgttgaagccagcctcagctgaacaccatgagaaaaaaggatttttcggctggtttaacgcccgcttcgaccggagcgttaaccactataccaacagcgtcagcggtattttacgtggaactggccgttatctggtgatctacctgctgatcgtcgtggggatggccgtgctgttcatgcgcttgcccacgtcctttctgcccgacgaagaccagggcgtcttcctgaccatgatccagctaccgtccggtgctacccaggagcgcacgcagaaggtcctggatacggtgacagactactacctgcataacgagaaggccaacgtcgaaagcgtctttaccgttaacggcttcagcttcagcggccagggacaaaactccggtatggcgtttgtcagcctgaagccctgggaagcacgcagcggcgataaaaacagcgtggagtccatcatcaagcgggccaccgtagcctttagccagatcaaagacgccatggttttcccgttcaacatgccagccattattgagctgggtaccgccaccggcttcgactttgaactgatcgaccagggcggactcggtcataccgctctgacccaggcgcgcaatcaactgctgggcatggtgaaacagcatccggatcagctggttcgggtacgccctaatgggctggaagatacccctcagttcaaactggatgtcgatcaggaaaaagcgcaggcgctgggcgtatcgctctccgatatcaatgaaacgatatcagccgcgctgggcggatactacgtcaatgactttattgaccgcggccgcgtgaaaaaagtgtacgttcaggctgatgcccacttccgtatgctgccgagcgacattaacaacatgtatgttcgtagcgccaacggcgaaatggtgccgttctccgcctttgtcacttcacgctggatatatggctcgccgcgcctggagcgctacaacgggttgccatctatggagatcctcggtgaagcttcgccaggcaaaagtaccggggaagccatggcgctgatggaaacgctggccagtaaactgccgagcggcatcggttatgactggaccgggatgtcttaccaggaacggctctccggcaaccaggcgcctgcgctctatgccatctcgctgatcgtcgtcttcctgtgtctggcggcgctgtatgagagctggtcgatccccttctcagtcatgttagtggttccgctgggggtcattggcgcgctgttagccgccacgctgcgtgggctgaataatgacgtttacttccaggtcggactcttgaccacgatcggtttgtcggccaagaatgcgatcctgatcgtcgagttcgccaaggatctgatggagaaagaagggaaagggatcattgaggccacgctggaggcatcgcggatgcgcctgcggcctattctgatgacctctctggcctttattctcggggtcatgccgctggtgattagccatggtgccggcagcggggcgcagaatgcggttggcaccggcgtgatgggcgggatgctgaccgcgacgctgctggcgatcttctttgttccggtgttctttgtggtcgttagacgacgctttacccggcacgctgaataactcggctatgtcttgaaggcgccccttgcgggcgctttttttcgcatgcaatattggcagccagctaaacgcgccacagtctggcaaccgccatcgcacgcagcatcgctgaatcacaatctttctctccatcttttctgcatattcccgggcttatcttcacgatatttacgcggctcatatattgagatgatttcggcctccggcccggacaattcgcggtgataaaataagccattccgttctgcactggctttcagtacaacccagcggattatccagaggtaatatcatgaaaaagtatttaatcgtggcgctgctggcctctctactggcaggctgtgcccatgactctccctgcgtaccggtttatgactcgcaaggccgcttagtccataccaatacctgtatgaaaggcacaacagaagacaactgggaaaccgcaggcgcaatcgccgggggtgcggccgcggtagccggcctcacgttagggatcgttgctctgacccgctaattcacccccgaccagcagatactggggctagcgtcgaacctgtatctgctcttctgcgcatcatccacatgacaaccgggcaaataaactctctgtcccttgctgcattacgagcaaatcgactttgacgggtttccccctggtggcaggactgtttatcaacagataacagataacacaaaagcaaaaggcccagtctttcgactgggccttttgctttatttgatgcctggcgattccctactctcacatggggagaccccacactaccatcggcgctacgacgtttcacttctgagttcggcatggggtcaggtgggaccgccgcgctattgtcgccaggcaaattctttacaacgtgccgaactttaacctaaaaagtggtgctgatacccagagtcgaactggggacctcacccttaccaagggtgcgctctaccaactgagccatatcagcacgctaaatttgatgcctggcagttccctactctcacatggggagaccccacactaccatcggcgctacggcgtttcacttctgagttcggcatggggtcaggtgggaccaccgcgctagtgccgccaggcaaattctgttttatcaacacgtctcaccgacgtatcgattaatctgtatcagagctgaaaattctctcaaatcgccaaaacatcttcggcgttgtaaggttaagcctcacggttcattagtaccggttagctcaacgcatcgctgcgcttacacacccggcctatcaacgtcatcgtctttaacgttccttcaggagacttaaagtctcagggagaactcatctcggggcaagtttcgtgcttagatgctttcagcacttatctcttccgcatttagctaccgggcagtgccattggcatgacaacccgaacaccagtgatgcgtccactccggtcctctcgtactaggagcagcccccctcaattctccagcgcccacggcagatagggaccgaactgtctcacgacgttctaaacccagctcgcgtaccactttaaatggcgaacagccatacccttgggacctacttcagccccaggatgtgatgagccgacatcgaggtgccaaacaccgccgtcgatatgaactcttgggcggtatcagcctgttatccccggagtaccttttatccgttgagcgatggcccttccattcagaaccaccggatcactatgacctgctttcgcacctgctcgcgccgtcacgctcgcagtcaagctagcttatgccattgcactaacctcctgatgtccgaccaggattagctaaccttcgtgctcctccgttacgctttgggaggagaccgccccagtcaaactacccaccagacactgtccgcaaccccggtaaggggccaacgttagaacatcaaacattaaagggtggtatttcaaggttggctccacgcagactggcgtccacgcttcaaagcctcccacctatcctacacatcaaggctcaatgttcagtgtcaagctatagtaaaggttcacggggtctttccgtcttgccgcgggtacactgcatcttcacagcgagttcaatttcactgagtctcgggtggagacagcctggccatcattacgccattcgtgcaggtcggaacttacccgacaaggaatttcgctaccttaggaccgttatagttacggccgccgtttaccggggcttcgatcaagagcttctccttacggataaccccatcaattaaccttccggcaccgggcaggcgtcacaccgtatacgtccactttcgtgtttgcacagtgctgtgtttttaataaacagttgcagccagctggtatcttcgactggtctcagctccacccgcaggggcttcacctacacaccagcgtgccttctcccgaagttacggcaccattttgcctagttccttcacccgagttctctcaagcgccttggtattctctacctgaccacctgtgtcggtttggggtacgatttaatgttacctgatgcttagaggcttttcctggaagcagggcatttgttacttcagcaccgtagtgcctcgtcatcacacctcagccttgattatccggatttgcctggacaatcagcctacatgcttaaaccgggacaaccgtcgcccggctaacatagccttctccgtccccccttcgcagtaacaccaagtacaggaatattaacctgtttcccatcgactacgcctttcggcctcgccttaggggtcgactcaccctgccccgattaacgttggacaggaacccttggtcttccggcgagcgggcttttcacccgctttatcgttacttatgtcagcattcgcacttctgatacctccagcaaccctcacaggtcaccttcgcaggcttacagaacgctcccctacccaacaacacatagtgtcgctgccgcagcttcggtgcatggtttagccccgttacatcttccgcgcaggccgactcgaccagtgagctattacgctttctttaaatgatggctgcttctaagccaacatcctggctgtctgtgccttcccacatcgtttcccacttaaccatgactttgggaccttagctggcggtctgggttgtttccctcttcacgacggacgttagcacccgccgtgtgtctcccgtgataacattcttcggtattcgtagtttgcatcgggttggtaagtcgggatgaccccctagccgaaacagtgctctacccccgaagatgaattcacgaggcgctacctaaatagctttcggggagaaccagctatctcccggtttgattggcctttcacccccagccacaagtcatccgctaatttttcaacattagtcggttcggtcctccagttagtgttacccaaccttcaacctgcccatggctagatcaccgggtttcgggtctataccctgcaacttaacgcccagttaagactcggtttccctgcggctcccctatacggttaaccttgctacagaatataagtcgctgacccattatacaaaaggtacgcagtcacacccgaaggtgctcccactgcttgtacgtacacggtttcaggttctttttcactcccctcgccggggttcttttcgcctttccctcacggtactggttcactatcggtcagtcaggagtatttagccttggaggatggtccccccatattcagacaggataccacgtgtcccgccctactcttcgagttcacaacctgtgcattttggtgtacgggactatcaccctgtaccgtcggactttccagaccgttccactaacacacaagctgattcagactctgggctgctccccgttcgctcgccgctactgggggaatctcggttgatttcttttcctcggggtacttagatgtttcagttcccccggttcgcctcgttaacctatgtattcagttaacgatagtgtgacgaatcacactgggtttccccattcggacatcgccggttataacggttcatatcaccttaccgacgcttttcgcagattagcacgtccttcatcgcctctgactgccagggcatccaccgtgtacgcttagtcgcttaacctcacaacccgaagatgtttcacttctgattgcgaaaatttgagagactcgaacacacattgactgtgtgtcgtttcaattttcagcttgatccagatttttaaagagcaaaatttcacaatgcacttcgcagtacattttgaaatttattatttatcaaacaatctgtgtgagcactacaaaggcaggttctttaaggtaaggaggtgatccaaccgcaggttcccctacggttaccttgttacgacttcaccccagtcatgaatcacaaagtggtaagcgccctcccgaaggttaagctacctacttcttttgcaacccactcccatggtgtgacgggcggtgtgtacaaggcccgggaacgtattcaccgtagcattctgatctacgattactagcgattccgacttcatggagtcgagttgcagactccaatccggactacgacatactttatgaggtccgcttgctctcgcgaggtcgcttctctttgtatatgccattgtagcacgtgtgtagccctggtcgtaagggccatgatgacttgacgtcatccccaccttcctccagtttatcactggcagtctcctttgagttcccggccggaccgctggcaacaaaggataagggttgcgctcgttgcgggacttaacccaacatttcacaacacgagctgacgacagccatgcagcacctgtctcacagttcccgaaggcaccaatccatctctggaaagttctgtggatgtcaagaccaggtaaggttcttcgcgttgcatcgaattaaaccacatgctccaccgcttgtgcgggcccccgtcaattcatttgagttttaaccttgcggccgtactccccaggcggtcgatttaacgcgttagctccggaagccacgcctcaagggcacaacctccaaatcgacatcgtttacggcgtggactaccagggtatctaatcctgtttgctccccacgctttcgcacctgagcgtcagtctttgtccagggggccgccttcgccaccggtattcctccagatctctacgcatttcaccgctacacctggaattctacccccctctacaagactctagcctgccagtttcgaatgcagttcccaggttgagcccggggatttcacatccgacttgacagaccgcctgcgtgcgctttacgcccagtaattccgattaacgcttgcaccctccgtattaccgcggctgctggcacggagttagccggtgcttcttctgcgggtaacgtcaatcgccaaggttattaaccttaacgccttcctccccgctgaaagtgctttacaacccgaaggccttcttcacacacgcggcatggctgcatcaggcttgcgcccattgtgcaatattccccactgctgcctcccgtaggagtctggaccgtgtctcagttccagtgtggctggtcatcctctcagaccagctagggatcgtcgcctaggtgagccgttaccccacctactagctaatcccatctgggcacatctgatggcatgaggcccgaaggtcccccactttggtcttgcgacattatgcggtattagctaccgtttccagtagttatccccctccatcaggcagtttcccagacattactcacccgtccgccgctcgtcacccgagagcaagctctctgtgctaccgctcgacttgcatgtgttaggcctgccgccagcgttcaatctgagccatgatcaaactcttcaatttaagtttgatgctcaaagaattaaacttcgtaatgaattacgtgttcactcttgagacttggtattcatttttcgtccaaggacgttaagaatccatgtcactttgagtgcccacacagattgtctgataaattgttaaagagcagttgcgacgcgctttagcgctctgtcgcgaggtggcgtatattacgctttcctctttcagagtcaacccgtttttcaggatttttctctgcaaccgaaccggctgtttgtgtgaagtgattcacatctgccgtgtcagtgggtgcgcattatagggatcccatttttttgcacaagccttttttcgatctttttttctgaatggtgatttttcacccttttcgccgtgtaattgcacgatttgctcaattttcaccgttttcaggggttgcacaggaagataaaagccaccaaagtcttcttatgctcccgtatttttgaggtctatatgtctgctcagctgcgcccctacaaagcatttttcccacaaatcggtcttcgcgtcatgattgacgcatccagcgtcgtcatcggcgatgtcagaattgccgatgacgtcagcgtctggcctctggtggccattcgcggcgacgtcaactatgtatcgataggtcaacgcagcaatattcaggacggtagcgttctccatgtgacccataagtcctcttataagccggagggaaatccgctgatcattggtgaggatgtaactgttggtcataaagtgatgctgcacggctgcactatcggcaaccgcgtactggttggcatgggttcgatcttattagatggtgtcgtcgttggcgacgacgtcatgataggtgcgggaagtctggtaccgcagaacaaacagctggaaagcggctacctttactttggcaatccggtcaaacagatccgccccctgacagaggcggaacgggaaggactcaagtattcagcaaataactatgtgaaatggaaaaatgagtacctggatcaggataaccagatccagccctgagcatcttcctgaccatcgcggatcaatgcttctgcctcttcctctagatcccaacgatgttcctggaaggcggccagccactgcgctggcccctctgcaccgaaacgctgctgcaggatttgccctgaaattgcgcaggttaattgcatcccattcaccagcgcgggaaaaaccacgccctgccgttcggcatcccatgattcccggtcaggaaactgaatcgcctgattcatgcattcagttcctgctgcagcgtttcaatgaccggagcgatagccggcagaacgccgtgccatagcagaacagcatgggcggcttgcgccaccagcattcccagcccatcggcacagtgaactgcgccatattgctggcaccagtgaagaaacggtgtcggccctttctggtaaaacatgtcatagcaatatacgtcagcgttgacaatagatgccgggatagctggtacatcaccgtctattccactggacgtcgcattgacgatcagatcgaatgtttccccggataaggtatccatctcccttgcgctaacgctcccggtatgggcgaagagagtggctaactcacgggcacgagaataggtgcgattcacgatcgtgacggcgcatcccagcgacagaagcggcaaaagaacaccgcgagatgccccaccagcaccaacaagcaggatccgttggcgtggcttaatgaatcccaggcgttccagatcgctcagaagaccaataccgtcggtgttgtcccccagtaaacggccatcttccaggcgtttcagggtgtttactgctcccgccagcgctgcgcgttctgtcagttcgtcggcacgcgcaaaggcttcctctttaaaaggaacggtgacgttggccccctttcctccttctgcaaagaactgattcagagaagagacaaaatcgtccagcggcgccagtacacgtccataaggatgagtaattcctaactggcgggcaaacagctgatgaatagcaggcgacttgctgtgcgcgatcggattaccaaaaacggcataggtttccatggttcacccctggcggaacagttcacccgtcagggcatcacggatttcagatgggttttgccggccgcccgtggcgccatccaccaccgggaagctgtcgccaaactgagcatggacctctgcggtagtacggcacggtggttgcccggtgagattggcgctggtcgaaaccagtggttttccgtaggcttcgcacaattcgattaccagcggatggttagtcacgcgtacggccagtgaatcaaaacgtccagtcagccagcgcggcgtttcaggacgcgccgggaatacaaacgtcaccggtcccggccagcaagagaagatggcttcccgctgtgagtcacttaaccgtgaatcatcaatatagggcttcagttgctcaaagctggcggcgataaggatcaatcctttctcaacaggacgctgcttcagctccagcaggcgcataacggccgtttcgctgtcagggtcgcagccgacgccaaacacagcttcggtgggataggcgatgacatgttcatttttcaggaccgccacggcatgggcgacggcttctgagggcaggttattgttcactgatttattccgccgggatcggctttccacattgtttactggcacagaagcgtctgagcccctgcgccgtcttcttttctattaacagcgggtaatggcattcagggcattcgcccgccaccggtttaaaattgataacgaactggcaatcaggatagcgatcgcaggagtgaaaggttttaccgaaacgggaacgacgctggaccagatggccttgtccgcactgcgggcaagcgatagccgtctcatcgggtttatcaatcagctcggtatgttcacattccggatagcggctacagccaatgaacatcccaaaacgcccctggcgtaacaccataaccgcaccgcacgatgggcactcttgcccctccagcaccttaacgatatgcccgtccgcctggcttttcaggggacgaatatagtcacagtccggataatgcgaacagccgagaaacgggccatgtttcccggaacggatcaccagttcggccccgcactgcgggcagggctcatttttacgcaccgaaaacagtgctgatttggtcataacaactcgatgttgctgcaaaaagattaatgcagcataccttcatttacttcgaagagtaattcttccatttgctgataggcgttttcacagcccggaatattgaacagtaccatcaggatgacccatttcaggtcttccagctcaaattccgccgtatccagcgccagtacgcgctctatcaccatttctcgcgtttcgaggttcaacacctgaatctgctcgaggaagagtaaaaacccccggcaactggcatccagacgctggcactcctcttcggtatatacccgaagagagagcgggtcggaagcgagctgcatgggttcaacgagaccttcctgataatcagccagtttctcgagccacattaacgcgttatagatgtcttcccgctcaaaacccgcatcggtaagatcccgcgtcagtttgtcctgatccacgcgcatttctgcttcgctatggatgtaagtttcaaacaaatacatgagtacgtcgaacatggcttgccctccttaatcggacatagccgccgggtacagctgcgatccagcctgctaactccagttcaagtagctgagctacggttactggcacagattggccggcacgttcagcgacaacgtcaacaggtgttacctcatctcctacgttagccaggagctccggaaatggcaatgctacagacggctgatcgacgcaaatatttatcgaatcagacgtatcagtcagccaggccagctcgttatgccagtattccacaatatcctctggcgaggtcactggcaccgcgccttgcttaattaaccagtgcgggccttccgatcccggattgcctatcgggccaggcagggcgaacacatcccttccctgctccagggcgcagcggacggtgaccagcgatccgcttcgcaacgccgcctcaatcaccagcacgcccaggcttaagccgctgataatccggttgcgcctggggaaatgtgcgggaagcggcggcgtaatgagtggaaattcagataccagcgtaccgccattgtcgatgatctgccgggcgagagttgcatggcgccgcggataaacctgactcagcccattgcccagtaccgcgatagttttaccctccgccgccagcgcgccgcggtgcgcgaccccgtcaatgcctaacgccagcccactggtgatggtaatccctttatgcgccagcgtttcgctgaacagtttcccccagcgggcgccataccaggagtgcgagcgactgccaataacggcaagctgcgcgctgtgaagcagggcgaggccgccgctgaccagcaacgcgccggggtaatcagcgatagactttaaccgcaatggatagcgcggatcgtcaccccgtaacagatgatgatccggttgttccagccagcgccgcgtctcgtcaagctcatgctcgtcaagccggaaaaataactttgcctgcgccgcggtcatcccgacggcatgcagcgcttcacgatcaacgctggcggctgcgcataagcgctgagcgatctctaccatcctgtcgccatacaagctactgaccttcatcagccgcagccaaatctcgtcgggcgtcatccttaccccctgccataagcggtattgacaatctttgcgattggacagtgagactgtcaattgcagggggttttgtctagaatagagctaataatcttatcaactcctgaatacgactctggaactttatggcagttttgcaagtgttacatattccggacgagcgccttcgcaaagtcgccgagccggtcaaagaagtgaatgcggaaattcagcgtatcgtcgatgatatgttcgacaccatgtacgccgaggaaggcatcggtctggccgcaacccaggtcgatatccatcagcgcattatcgttattgatgtgtcggaaaatcgtgaagagcagctggtattaattaacccggaaatgctggagaaagatggcgaaaccggtattgaagaaggctgcttgtccattcctgaacagcgcgccctggtgccgcgtgcggaaaaagtgaagatccgggcactggatcgcgatggtaagccgtttgaactggaggccgatggcctgctggctatctgtatccagcatgaaatggatcacctggtcggcaaactgtttattgactatctgtcaccactcaaacaacagcgcattcgtcagaaggtagagaaactggatcgtttacgttcccgtgcctgataacaaggaataccgtgtcacaatcactacgtatcattttcgccggcacccctgattttgcagcgcgtcatcttgatgcgctgctgtcgtctgaacatcaggttgttggcgtattcactcagcctgatcgccctgctggtcgcggcaaaaaattgatgccaagcccggtaaaagtactggcagaagcccataacttacctgtgttccagccatcctccctgcgtccgcaggataaccagcggttagtcgccgatctcggcgccgatattatggtggtagtggcgtacggtctgattctgcctaaagcggtgctggagatgccccgtctgggctgtatcaacgttcacggctcgctgctaccgcgctggcgtggcgcagcgcctattcagcgttcactgtgggcgggggatagcgaaactggcgtaaccatcatgcagatggacgtcggccttgatacgggggatatgctgtataagctttcctgtcccattaccgcagaggataccagcggcagcctgtacgataagctggccgagctcggccctcaggggctgctggcaacgttagcccagctggccaacggcaccgcacggcctgaagtacaagatgaatcgctggtgtgccatgccgaaaagctgagtaaagaagaggctcgtatcgattggtcgctttccgctgcgcagttggaacgctgcatccgcgcgtttaatccgtggccaatgagctggctggaaattgacggacaaccggtaaaagtgtggcgagcatcggtcatcgccgaagccgctcacgccgaaccgggtactatcgtggcagcaaccaaacagggtattcaggtcgccacgggggatgggatcctcagcctggagtcgctacagcctgcgggtaaaaaagcgatgagcgcccaggacttactcaattcccgccgggagtggtttatccctggcacccgtctcgcctgacggtcgtctcttctgaagcccgggttcgccgggcatttttatttttgcgcttatgaaaaagaatataaatttacgcagcctggccgcccaggctatcgagcaagttgttgaaaaagggcagtctttaagcaacgtactgccccctctacagcagaaagtcagcgataaagataaagcgctactgcaggagttgtgctttggtgtactacgtactctaagccagctggagtggcttatcagcaagctaatggcgcgtccgatgaccggcaaacagcgcaccgtgcactttctgatcatggttggtctctatcagttactctacacccgcattcccccgcatgccgcgctggcggaaacggtagaaggcgcggtggccattaaacgcccgcagcttaaagggctgatcaacggcgtgctacgccagttccagcgccagcaggaagcgttgttagccgaatttgctgagcatgaaaaccgctatcttcatcccaaatggctgctgaaacgcctgcagcaggcctggccggagcagtggcaggagatcgtcgaggcgaacaaccagcgcccgccgatgtggctgcgcgttaaccgcaaccatcattcccgggatgagtggcttgccctgcttaacgaggccggtttagagggctttacccaccctgattatccggacgccgtacgcctggccacccctgctccggtccacgcgttaccaggctttgccgaaggctgggtgaccgtccaggatgcctcggctcagggctgtatgcgctacctgcaaccggaaaatggcgaacgcattctcgatctctgcgcggcgccgggcgggaagacgacgcatattctggaagtcgctccccaggctcaggttatggcggtggatattgatgaacagcgtctgtcccgcgtctatgacaacctgaagcgtctgggtgtaaaagcggaagtaaaacagggcgatggtcgcttccctgagcagtggtgtggcaatgagcagttcgatcgtattctgctggatgctccctgctccgcaaccggcgttattcgccgccatccggatatcaaatggctgcgccgggatcgggatatcgccgagttagcccaactgcaggccgagatcctcaatgccatctgggggcacctgaagccaggcggcacgctggtttacgcaacctgttctattctgccggaagagaacagtcagcaaattgccgccttcctcgcgcgaactccggatgcagaacttcacgcaaccggcacgccggcgagccccgggcagcaaaatctgccgggcgtggaagaaggtgatggcttcttttacgctaagctaatcaaacgtcggaactaatgggttactgcagatgaagattattattctgggcgccggccaggtcggcggcacgctggcggaaaacctcgtcggcgagaacaatgatattacgctggttgataccaatggcgaccgtctgcgcagcctgcaggataagttcgacctgcgtgtcgtccaggggcatggctctcaccctcgcgtactgcgtgaggcgggggccgatgatgccgatatgctggtagcggtcactagttcggacgaaaccaacatggtggcctgccaggtcgcttactcattgttcaatacgccaaaccgcatagcgcgtattcgtgcgcctgattacgttcgtgatgcggaaaagctcttcaactctgaagcggtacccatcgatcacttaatcgctccggaacaactggtcatcgacaacatccaccgtctgatcgaatatcccggcgcgctgcaggtcgtgaacttcgcagaaggaaaagtcagtctcgcggtagtaaaagcctattatggtggcccgctggtggggaatgccttatccactatgcgggagcatatgccgcatatcgatacgcgcgtggccgccattttccgccacgatcgccccatccgcccgcagggctcgacgattgtcgaggccggagatgaagtcttctttattgccgcctcgcagcatattcgcgcggtcatgagcgaactgcagcgactggaaaagccgtataagcgtattatgctggtcggcgggggcaatattggcgcgggtctggcccataagctggaaaaagattacagcgttaagcttatcgaacgtaatcagcagcgagccgctgagctagcggaaaagctgcagcatactatcgtcttctacggggatgcatcggaccaggagctgttggctgaagagcatattgaccaggtggacctgtttattgccgtcactaacgacgacgaagccaatattatgtcggctatgttggccaagcgaatgggcgcgaaaaaagtgatggtgctaatccagcgcagagcctacgtggatctggtccagggtagcgtcatcgatattgcgatttcgcctcagcaggccacaatttccgcactcctcagtcatgtccgtaaagccgatattgtcggcgtctcctccttgcgccgcggcgttgcagaagcgattgaggcagtcgcgcacggcgatgagagcacctcccgggtagtcgggcgttcgatcgatgagatcaaacttccaccgggcacgatcatcggcgccgtcgtgcggggcaatgacgtgatgatcgccaataataatctacggatcgagcagggcgaccatgtgatcatgtttttgaccgataagaagtttatttccgatgtcgaaaggctgttccagccaagtcctttcttcctgtaattcccagggcgccgaacaggcgcctttttattatcccttattattcaaaggttaatattttgcagtaactatctgctgggaatggcaaatgaaaatacatttgttaaacttacaacgtcagctggcacaaggagaataaaatgagttttttaaaagagtttcgcgaattcgcgatgcgcgggaacgttgtcgatttggcagtgggtgtgatcatcggtgcagcattcggtaaaattgtttcatcactggtcgcggatattattatgccgccactcggcctgttgattggcgggatcgattttaaacagtttgccgtcacgctacgtgatgcccagggcgatgtcccggctgtggtgatgcattatggggtattcattcagaacgttttcgatttcatcatcgtcgcgtttgccatcttcatggcgattaaattgatgaataagttaaatcgtaagaaagaagaggctccggcggcaccgccagccccctctaaagaagaagttctgctgagcgaaattcgcgatctgctgaaagaacaaaacaaccgttcttaatcagcagagaaagcagaaggccagtggtaaaaaagcgattcgcttgcttgccactggcctcccgatcaacccttcctgcatgtttatctttacgttgatagcttcctttccctttcttgtttttctctacgcgctgcctgaataacggatcgtggagaagtgcctcaatggcgttatctttaatttgtcctttagtatgctgatagcgactcatagttactccggtatatgtataaactcggcgcgagtgtagatccgcgcgtttaaaaaatcaacgtccgccattgccgttgctggccccttgttcaagggcctcaaggatagaacagtaaacgctgctgtgggcagtgccgcaacaggcatcgttgagccgctgcagagagcggcgcatcgtctgtagctctttaatccgcgcctcgacttcacttaatcgcgcctgaacgatccctttcgactcctgacaggtatgatgctccggatcgatgcggatcgacaataattcgcggatcgcttccagggtgaaacccagttgtcgggcataacgaataaagcgcagccgttgaagatcgttatccgagtacagacgaaatcctccctcggtgcgtatgtcatgatccatcatctgctgcttttcatagtagcggatggtatcaggcgtcacgtcagccagttttgccaattcaccaatacgatacatatttactcctgatttattttttgcagcaacgcatcggcgtactcaccgcgtaaaaagtcggtgttcagacctgcctgacgtaacttcagctcgagcagggcaaggcgtttgctaagttcggcatgacgcggatcgtcctgacggacgccattcagtaaatctgccagagccaacgcttctttgcgttgctccagttccggaggaagacatcctgcatttttcagaaggcgatagcctgcccgcaactccgtcggcacatgtgaatcgtcatcgagagtcagcggttctccgctgccgggtaaattatcgaactcacctttggtttgggcatcgaggatatgacgttccgcccactgatccagcaaccacattctacggctccaggggatgaacaaaaagagtacagatagtgtagtgaaatggggatggggtagatataaaaaaacccgccagggcgggtttttttacgttactacagattactctgcagcagcttctgctttcggctcagcacgatcaaccagctcgatgtatgccatcggcgcgttgtcgcctgcacggaagccacacttcagaatgcgagtgtaaccaccggcgcggctcgcgaaacgcgggcccagctcgttaaacagttttgccacgatctcgttatcacgagtgcgggcgaatgccagacgacgattagcaacgctatcagtcttggcaagagtaatcagcggctcaactacgcgacgcagttctttcgctttcggcagggtcgtcttgatgatttcatgacgaaccagcgaacctgccatgttacggaacatagcctggcgatggctgctgttgcggttcagttgacgaccactcttacgatggcgcatgaccttatccttctcagtaaaaccttaacctgtgatccggttactcgtcagcaatgcttgctggtggccagttttccaggcgcatgcccagagacagtccacgggaagccagcacgtctttaatctcagtaagagattttttacccaggttcggcgttttcagcaactcaacctcggtacgctgtaccagatcaccgatatagtggatagcttctgccttgaggcagttagcagagcggacagtcaattccagatcgtcaacagggcgcagcaggatcggatcgaattctggtttctcttctttcacttctggctgacgtacatcacgtaggtcaacaaaagcttccagttgttcagccaggatggttgccgcacgacgaatcgcctcttcaggatcgattgtgccgttggtttccatttcgatgaccagcttgtccaggtcggtacgctgttctacacgcgcagcttcaacattgtaggcaatacgctctacagggctgtagcaggcgtcgaccagcagacggccgattgggcgctcatcttcttccgaatgaattcgggcagaagccggcacataaccgcgaccgcgctgaactttgatacgcatgctaatagcagcgttctcatcagtcaggtggcaaatcacgtgctgcggcttgacgatttcgacatcaccgtcgtgggtaatgtcggctgcggtcacagggccaatgccagatttattcaaagtaaggatgacttcatctttaccctgaactctcaccgccagccctttcaggttgagcaggatttcaaggatgtcttcctgaacgccttctttggtgctgtactcgtgcagtacaccatcaatctcaacctcggtcaccgcgcaacccggcatcgatgagagcagaatacggcgcagtgcgttacccagagtatggccgaagccacgctctaaaggctcaagggtcaccttggcgtgcgtcgaactcacttgctcgatatcgaccaggcgcggttttagaaactctgtcacagaaccctgcattgtgtcctctctttggtactaagctttacttggagtaaagctcgacgatcaggtgttcgttaatgtccgcagacagatcagaacgctccggctgacgcttgaacgtaccttccatcttgccagcatcaacttccagccaggttggcttttcacgctgctcagccagctccagagcggctttcacgcgagattgctttttcgctttctcacgaatgctgacaacgtcattcgctttaacctgataagaagcgatgttaacaacacgaccgtttaccataatcgctttgtggctaaccagctggcgtgcttcagcacgagtggcgccgaagcccatacggtatacaacgttgtccagacgaccttccagcagagccaacaggttttcaccggtgttgcctttcagacgtgctgcttctttatagtagttacggaactgacgctccagcacaccgtacatacggcgaactttttgcttttcacgcaactgcacaccatagtcagacagacgcggcttacgcgcaccgtgctggccaggagcttgttcaattttacacttggtatcgatcgcgcgaacgccagacttaaggaataagtcggtgccctcacgacggctcagcttgagcttaggacccaaatatcttgccattttctttctccaactaacctggaaaacgcagcgttatacgcgacgttttttcggcggacgacaaccgttatgagggatcggagtcacatcagtaatattagtgatgcggaaaccagcggcgttcagtgcacgaatggtagattcgcgacccggacccggacctttgaccataacttccagattcttgatgccgtattcttttacggcttctgcgcaacgctctgctgcaacctgagctgcgaacggagtggatttgcgagaaccacggaaaccggaaccaccggctgttgcccaacccagtgcgttaccctgacgatcagtgatggtaacgatggtgttgttaaaagaagcatggatatgagccacgccgtcagagacttgttttcttacacgcttacgtgcacgaattggtgcctttgccattattcaatcaccccgattatttcttgatcggtttacgcggacccttacgggtacgtgcgttggtcttggtacgctgaccgcgaaccgggagaccacgacgatgacgcaaaccacggtagcaaccaaggtccatcagacgcttgatgctcagggtgatttcacggcgcagatcaccttcaacgacaaatttacctactgcttcacgcagaatatcaatttgttcttcagacagctcactgatcttaacattttcagcgatgcccgtttcagcgcagatggctttagaacgggttttgccgataccgaaaatagcggttaaagcgataacggtatgtttgtgatcaggaatgttaatgcctgctatacgggccactatgcactcctactatttaatatgtacgcaccatgctgaaaagcccgttttcaggatactcaaatggaaacgtacagacatacaaaagattggctggctaatctagccagctcaatccaactttgcaagaaaaatatgcgaaaaaatcagccttggcgctgtttatgcttcggctcggcactgcaaatcacacggatgacaccatcacgcttaacgattttgcagttacggcataatttcttgacggaagcacgaactttcatttttactctccgtaacttctcgggcgaccagttttaacggccgtagcctttcaggttcgccttcttcaatgcagactcatactgactggacatcatcagagtttgcacttgagccataaagtccataatcacgacaacaacgataagcagcgaggtcccaccgaagtagaacggcactttcatcgcgtcacgcatgaactccgggatcaggcagataaaagtaatgtacaacgcaccaaccagagtcaggcgagtcatcactttatcgatatacttcgccgtttgctctcccggacgaattcctggtacaaatgcaccggacttcttcaggttatctgctgtttcacgcgggttgaaaaccaacgccgtgtagaagaaacagaagaagatgattgcagacgcatagagtaacacataaagcggttgcccaggctgcaaatacagcgaaattgttgtcagccagttccaaccagtaccacccccgaaccatgacgtgatggttgccgggaacagtataatactggaagcgaagattgccgggattacccccgccatattcactttcagcggtaaatgtgtgctctgtgcagcatagacacgacgaccctgttgacgtttcgcgtagtttaccacaatgcggcgttgaccacgctcaacgaatacaacaaagaaggtcactgcaaatactaatactgcaaccaacagcaacaggaggaagtgcaggtcgccttgacgcgcttgctcgatagtatgggcgatggccgcggggagtcccgcaacgataccggcgaagataatgatcgagataccgttaccgataccacgttcagtgatctgttcgccgagccacatcaggaacatagtccctgtgaccagactgacaacagcggtgaaatagaatgcaaagcctggattaatcaccaggccttgcataccaggcatattcggcagaccggtagcaataccgatcgactggaatatcgccagcaccagagtaccgtagcgggtgtactggctgatcttacgacgaccagactccccttctttcttcagttccgccagcggttgataaaccaccgtcagcagctgcacgatgatcgatgccgaaatgtacggcataatccccagcgcaaagatagaagcacggctgagagcaccaccagagaacatgttgaacatttcaatgatggtgcctcgctgttgctcaagcagtttggcaagtacagcggcatcaataccagggatcggaataaaagagccaatacggaacactatcagcgcaccgaccacaaacagaagtctgcgtttcagttcgccaaggccacctttggcactttgaaaatctaatcccggttgtttagccatctgctacttattcctcaattttaccgccagcagcttcgatagcagcacgagcacctttagtcacacgcaggccacgaacagttaccggacgagttacctcaccagacaggatcactttcgcgaactcgatctggacaccgataatgttagccgctttcagcgcgttcaggtctactacatcgccttctacgtgagccagatcggagagacggatctctgcggtgatcatcgctttacgagaagtgaagccgaatttcggcagacgacggtacagaggcatctgaccaccctcgaaaccgcgacgtacgccaccgccagaacgagatttctgacctttgtgaccacgaccaccggttttaccgaggccagaaccgataccacgacccaggcgtttacccgcctttttggagccttcggccggagacagagtatttaaacgcatctcttactcctcaactttaaccatgaaggaaaccgcgttgaccataccacgaacagcaggagtatcctcgcgctctacggtgtgaccaatacgacgcagacccaggccaagcagcgttgccttgtgtttcggcagacgaccgattgcactgcgggtttgagtaattttaatagtctttgccatggtttatttccccagaatttcttcaacggatttaccacgcttggcagcgaccatatccggggacttcatgttttccagaccgtcgatagttgcacgaaccacgttaatcgggttagtggaaccatacgctttagccagaacgttacgaaccccagcgacttccagaacggcgcgcattgcaccaccggcgatgataccggtaccttcggaagccggctgcatgaatacacgagaacccgtgtgagtacccttaaccgggtgctgcagggtgccgtggttcagcgcgacgttaatcatattgcgacgggctttttccatcgctttctggatcgctgctggaacttcacgcgctttaccgtaaccaaaaccaacgcgaccgttaccatcgcctactacagtcagagctgtgaaggagaaaatacgaccacctttaacggttttagatacgcggtttaccgcgatcagcttttcctgcagttcgccagcttgtttttcgatgtgagccatcttacacctctaccttagaactgaaggccagcttcacgggcagcatctgccagtgcctggacacgaccatgatattggaacccggaacggtcaaaggaaacatctttgatgcctttttccagagcgcgttcagcgacagctttacccacagctgctgcagcgtctttgttaccggtgtacttcagttgttcagcgatagctttttctacagtagaagcagctaccagaacttcagaaccattcggtgcaattacctgtgcgtaaatgtgacgcggggtacgatgtaccaccaggcgagttgcgcccagctcctggagcttgcggcgtgcgcgggtcgcacgacggatacgagcagatttcttatccatagtgttaccttacttcttcttagcctctttggtacgcacgacttcgtcggcgtaacgaacacccttgcctttgtaaggctcaggacgacggtaggcgcgcagatctgctgcaacctggccgatcacctgcttatcagcgcctttcagcacgatttcagtctgagtcggacattctgcagtgatacccgcaggcagctgatgatcaaccgggtgagagaaacctaaagccaggtttactacattccctttgaccgctgcacgataacctacaccaaccagctgcagcttcttagtgaagccttcggtaacaccgataaccattgagttcagcagggcacgcgcggtaccagcctgagcccaaccgtctgcgtaaccatcacgcggaccgaaggtcagtgcattatctgcatgtttaacttcaacagcatcgttgagagtacgagtcagctcgccgtttttacctttgatcgtaataacctgaccgttgatttttacatcaacgccggcaggaacaacgaccggtgctttagcaacacgagacattttttcctccgattaggctacgtagcagataatttcgccaccaagaccagcctggcgcgctgcacgatcagtcataacacctttagaggtagaaacaactgcgatacccagaccggccataactttcggcagctcatcttttttcttatagatgcgcagacctgggcggctgacacgctgaatgctttctacaacagctttgccctggaaatacttgagagtaagttccagttcaggcttggtgtcgccttcaactttaaaatcttcgataaaaccttcttccttcagcacgttggcgattgccactttcagcttggaggaaggcatggtgaccgcagctttgttcgcggcctgaccgttacggatacgggtcagcatatccgcgatcggatcttgcatgctcatctgtctttactcccgtgattcaattggtgacaattaccagctagcctttttcagacccgggatttcaccgcgcatagcggcttcacggaccttaatacggctcaacccgaacttccgcaggaaaccatgcggacgacctgtttgacggcagcggttacgctgacgagacgggctggaatcacgcggcagagtctgcagcttgagaacggcattccaacgatcttcgtcggttgcgttcacatcagagatgatagctttcagttcagcgcgtttagcgaagaatttatcagctaaagccacgcgctttacttcgcgtgctttcattgattgcttagccattaagtaaccctaccttacttgcggaacgggaagtcaaaggcagccagcagagcacggccttcttcgtcagatttcgcagtagtggtaatggtaatatccaaaccacgaacgcggtcgactttatcgtagtcgatttctgggaagatgatctgctcacggacacccatgctgtagttgccacgaccgtcgaaagacttagcggacaggccgcggaagtcacgaatacgcggtacagcaatagtgatcaggcgctcaaagaactcccacatgcgttcgccacgcagagttactttacagccgatcggatagccctgacggattttgaagcctgcaactgatttgcgtgctttggtgatcagcggtttttgaccggagattgctgccaggtcagctgctgcgttatccagcagtttcttgtcagcgatcgcttcaccaacacccatgttcagggtgatcttctcgacccgagggacttgcatgacagaattgtagttaaactcagtcatgagtttcttaactacttcgtctttgtagtaatcatgcagtttcgccatcgtactactccaaattacttgatagtttcgctgttagacttgaagaaacggacttttttaccgtcttcgaatctaaagcctacacggtcagccttgccggttgccgcattgaagattgcaacgttagaaacctgaattgcagcttctttttcaacgatgccgcctggttggttcagagccggaaccggcttctggtgtttcttaaccaggttgataccttcaacaatgaccttgccggaagacaggacattcttaactttaccgcgcttacctttatctttaccggttaacacgataacttcgtcatcacgacggattttcgctgccatgattcgctccttagagtacttctggtgccagagagataattttcatgaacttctcggtacgaagttcacgagttaccggcccaaaaatacgcgtaccgataggctgctcgctgttattgttcagaataacgcatgcattaccatcgaagcgaatgacagaaccgtccgggcgacgaacacccttcttggtgcgcaccactaccgccttcagcacatcaccttttttgaccttaccacgcggaattgcttctttgatggtgatcttgatgatgtcgcctacgcctgcgtagcgacggtgcgagccacccagaaccttgatacacattacgcgacgtgcaccggagttgtcggcgacgttcagcatagtctgttcttggatcattttagtgctccgctaatgtcaactactactgagacccgaaaattagggtcgttaaaaagccccatatcgagggcgcggcattataacaccacaaaccagatatgggtagaaaaaataaacggctcatcgctgagccgtttatccgtatcgagaatgcgtactctattacagaaccgctttctctacaacgcgaaccagcgtccaggacttagtcttggacagcggacggcattcgcggatttcaaccttgtcgccgataccgcattcgttgttctcgtcatgtacgtgcagtttggtcgtacgcttgatgaatttaccgtaaaccgggtgtttcaccatacgttcgatagcaacaacaatggatttctccattttgtcgctaactacgcgaccttgcagagtacggattttatcggtcattacgcacccgccttctgagtcagtaaagtcttaacgcgtgcaacatcacgacgcacttgcttcagcagatgagtctgttgcagctggccacttgcagcctgcatgcgcaggttgaactgctcacgcagcaggttcagcagctcagcgttcagctcttcaacgcttttttcacgcagctcttttgctttcattacatcaccgtcttagttacaaaggtggttttgatcggcagtttcgctgctgccaggccgaatgcttcacgggccagctcttccggtacaccgtccatttcatacaggactttacccggctgaatcaaggcaacccagtactccacgttacctttacctttacccatacgaacttccagcggcttctcggtgatcggtttgtccgggaatacacggatccagatcttaccttgacgcttaactgcacgggtcatagcacgacgtgctgcttcgatctgacgtgcagtcagacgaccacggccaacagctttcagaccgaaagtgccgaagctaacatccgtaccctgcgccagaccacggttgcggcctttgtgcactttacggaattttgtacgctttggttgtaacatcagcgacgctccttatttacggcctttacgctgctgctttttaggttgagcagccggttccggttgttcaacagcagccataccacccaggatctcacctttgaagatccataccttaacgccgattacaccgtaagtggtgtgcgcttcagaggtgttgtagtcgatgtcagcacgcagagtgtgcagcggtacgcgaccttcacggtaccattcggtacgtgcgatttccgcgccgcccagacggccgctaacttcaactttgatacctttagcgcccagacgcattgcgttctgtacagcacgcttcatcgcacgacggaacataacgcgacgttccagctgagaagtgatgctgtcagcaaccagttttgcgtccagttcaggtttacgaacttcggcgatattgatctgtgcaggtacgccagcgatatccgctacgaccttgcgcagtttttctacgtcttcgcctttcttaccgataacgatacccgggcgagcggtgtgaatggtcacacggatgctcttagccggacgctcgataacgatgcgagatacagacgctttagccagttctttagtcaggaactgacgtactttaaaatcgctgtccaggttgtcagcgaattctttggtgttcgcgaaccaggtagagttccatggtttgacaatacccaggcgaataccattaggatgtactttctgacccattgctagtctccagagtctcagcgatcggacacaaccacagtgatgtggctggtgcgcttcaggatgcgatctgcacgacctttagcacgcggcataatgcgcttcatgctcgggccttcgtctacgaaaattttcgcaactttcagatcatcaatgtcagcgccatcgttgtgttcagcgttagcaatggcagattccagtaccttcttgaccagtacagcagcttttttgttggtgtaggtcagaatatccagggcctgcgacactttcttaccgcgaatcaggtcagctacaaggcgaaccttctgagcagaagaacgagcatggcgatgttgagctaaagtttccatctcttcctcctaccttatttcttcttcgcttttttatcagcagcgtggccgcgataagtacgagtcggtgcgaattcacccagtttgtgaccgaccatttcgtcggaaacaaatactggaacgtgctgacgaccattatggacagcgatggtcaaaccgatcatgttaggaaagatcgttgaacgacgggaccaagtgcgcaggggcttcttgtctccgctttccaccgctttctctaccttcttcagcaagtgcaggtcaataaaaggacctttcttgagagaacgtggcatggcttatcctctaaaattatttgctacggcgacgtacgatgaatttatcagtacgcttgttgctgcgggtcttcttacctttggtctgcaggccccacggggataccgggtgcttaccaaagttacgaccttcaccaccaccatgtgggtggtctactgggttcatcgcagtaccgcgaacggtaggacgaacaccacgccagcgtgcagcacctgctttacccagaacgcgcagcatatgctcagcattgccaacttcgcccagagtcgcgcggcagtctgcttcgactttacgcatttcaccagaacgcagacgcagggtgacataagcaccgtcacgagcaacgatctgaacgtaagtaccagcggaacgagccagctgaccgcctttacctggtttcatttctacgttatgaacggtagaaccaaccgggatattgcgcatcggcagggtgttgcctgctttgattgcagcatcaacgccagactgaatctggtcgccagctttcaggcctttcggggccaggatgtaacggcgctcgccgtctttgtacagaaccagcgcgatgttcgcggagcggttcggatcgtactcaagacgttcaacaactgccgggataccatctttgttgcgtttgaagtcaacaatacggtaagcctgcttgtggccaccaccgatatgacgggtggtgatacggccattgttgttacgaccaccggatttgctgtttttttccagcaacggagcaaaaggtttgcccttgtgcagctctgggttaaccactttaacgacgtggcgacgacccggagatgtcggtttacatttaacaactgccattgtattactcctccgacttactcagcgccgccaacgaagtccagattctggccttctttcagggtgacgtaagcttttttccagtcgctacgacgaccgatacgctgtccgtgacgtttaactttccctttaacaaccagggtgttaacgacttcgacttcgacttcaaacagtttctgcacagcagctttgatttctgctttggtcgcgtctttagcaactttgagaacgatggtgtttgttttttccatcgcagtagacgctttttcagaaacgtgcggtgcgcgcagcaccttcagcagacgttcttcacgaatcatgccagcatctcctcaacttgcttaacagcatcagcagtcattacgactttgtcgaaggcgatcaggctaaccgggtcgataccgttcgcatcacgtacgtcaaccttatgcaggttacgtgcggccaggaacaggttctcgtccagctcaccggtgatgatcagcacatcttccagagccatgtctttcagtttctgtgccagcagcttagttttcggcgcttcaacagagaacttctcgacaacgatcagacgatcctgacgtaccagttcggacagaatgcttttcagcgcgccgcggtacatcttcttgttaactttttgactgtggtcctgcggacgagcagcgaaggtcacgccaccggaacgccagatcgggctcttgatagaaccagaacgcgcacggccggtacctttctggcgccacggttttttaccggagccagtgatttcagcacgagtcttctgagcacgagtgccctgacgcgcaccggctgcataagcaacaacaacctggtgaaccagcgcttcgttgaaatcacgaccgaaggtagtttcggaaacagtcagcgcgctctgcgcgtctttcaatactaattccattgctatctcctcacgccttcacagctggtttaacgatcaggtcgctaccggtcgcacccgggacagcacctttaaccagcagcaggttgcgctcagcgtcaacacgtactacgtccaggctctgaacggttacacgctcattacccagctgacctgccattttcttgcctttgaacactttgcccggagtctggttctgaccgatagaacccggaacgcggtgggacaaggagttaccgtgagtagcgtcctgggtacggaagttccagcgcttaacggtaccagcaaaacctttacctttagaggtaccggttacgtcaacttttttaacgtcagcaaacagttcaacgctaatgttctgacctacggtgaattcttcgccgtcagccagacggaattcccacagaccacggccagcttcaacgccagctttagcgaagtgacccgcttccggcttggttacacggttagcttttttagcaccggtggtaacctggattgcgcggtagccatcgttagccaggtctttaacctgagtaacacggtttgcttcaacttcgattacggttactgggatagaaacgccatcttcagtgaagatgcgggtcatgcccacttttttaccgactaaaccaatcattgtttcaacctctcaatcgctcgatgacctgattaacccaggctgatctgcacgtctacaccggcagccagatccagacgcatcagagcatcaacggttttttcagttggctcaacgatgtcaaccagacgcttgtgagtgcgaatttcgtactggtcacgcgcgtctttgttgacgtgcggggagatcagaacggtaaagcgctctttgcgggtcggcagcgggatcggaccacggacttgcgcaccagtgcgcttagcagtctcgacgatttccgcggttgattgatcgatcagacgatgatcaaacgctttcaggcggatacggattctttggttctgcatgagaccagagctccaattattttatagacgaaatgattactcctcatacccattacgattgatgggagagtgtaaccgttcttacatagtcccccgattggggacattgtttgataacccaaatgcgattaccagggttcatattgaaccggccgtcaactttgacaggcccgcgcattatacgcaaattctggcgcgacgcaagtgctgtttagaaaatcatcaccaggatttgcgcgccttcgcgttagcgcgctgtacggggatgcaatgcggagtaagagcgcggattgtgggatccattcccggaaaatgccttttgtgctgaacgggagaggatgagcatagtgacgcaatgttcatcgatcattgcggggtcaactatgctcgccgccctccccttcttgctgtgctatagcggtttgaccgtggcattatgccaccaggatctgcgccacggtctgttgcccgaccgttacacctgtcccctgctgtggagtggtttacttttttatctctgtctggcgccgcaccagctgcatgatgccgtctggggggcgatagggggctatctctctttggctgcgatttactggctataccgcggtatccgcggctatgaagggttgggttatggagatataaaatatcttgccgccctcggcgcctggcatggctggcgattgctgccgcagttggtcctggttgcctcgctactcgccggcatagcgtgggcaggagcaggtttatacgccagttgcggcaggaagagcaaatggggaagaagcaacccgctgccgtttgggccattcctggcggccgcgggtttttggtgcgggtggcagacgctggctagtctgacactttgatctgcgactgcaggtaattttgcagaccgattttgccaatcaaatcgagttcggtttccagccagtcgatgtggccttcttcatccgccaggatctcaatcatcatatcgcggctgacgtagtcatggacgctgtcggcataggcaatagcctcacgcaaattttgcgccccttccagctccagcctcaaatcggaccgcagcatctcttccacatcttcaccgatgccaagtttgccgagatcctgcagattagggataccttcgagaaaaagaatacgctcgatatacttatcggcgtgcttcatttcgtcgatggattcgtggtactcaatatcgttgaggcgcatcaggccccaatttttaaacattctcgcatgaagaaagtactgattaattgcgactagctcatttcccaataatttattgagataacttatgattttgacatcacctttcattatatagtccctccgcttccactcattgaagcgtagtccggcctatagggatgtcaaaagagaagcgtggacttcaggcgatttctttgaattccggcatggtggttaattcatcttccatcacttcacgcgcggcacgaacacacttaccgcattgatttcccacgggaacaaacttacgtaattgctgaaaagattgcggttgaaactggcgcacaacctgacgaatttttttatcgctgacgccattgcacaaacaaacgtacatagaaactcccgttcaatttatgcacaaatattaaatgagaatggttatgattacaatagaccatttgctcattatccgccgcaacgcacgatatgaatagccagcaataatccgtttttcgctgaatgacagacagcaaaaagggcgccgaagcgccctttttaattcaaagctaacgaattagcccagaactttagctacaacgcccgcgccaacggtacggccgccttcacggattgcgaaacgcagaccgtcgtccatcgcgatcgggtggatcagggtaacaaccattttgatgttgtcgcccggcattaccatctctacgccttccggcagttcgatggtgccagtcacgtcagtagtacggaagtagaactgcggacggtagcctttgaagaacggagtgtgacggccgccttcatctttggacaggatgtacacttcagattcgaacttggtgtgcgggttgatggtgcccggcttagccagtacctgaccacgttcgatttcttcacgtttgataccacgcagcagaacacctacgttctcaccagcacggccttcgtccagcagtttgcggaacatttcaacgccagtacaggtggttttcgcggtttctttgataccaacgatttcaacttcttcacctactttgatgataccgcgctctacacgaccggtaacaacggtaccacgaccggagatggagaatacgtcttcgatcggcagcaggaacggcttgtcaatcgcacgctctggttccgggatataggtatccaggtggccagccagttcgatgattttcgcttcccactctgcgtcgccttccagcgctttcagagcagaaccacgaacgatcggagtgtcgtcgcccgggaaatcgtactgagacagcagttcacgaacttccatctcaaccagttccagcagctcttcgtcatcaaccatgtcgcatttgttcaggaacacgatgatgtacggaacgcctacctgacgacccagcaggatgtgctcacgagtctgcggcatcgggccgtcagtcgcagcaacaaccaggatcgcgccgtccatctgcgcagcaccggtgatcatgtttttaacatagtcggcgtggcccgggcagtctacgtgcgcgtagtggcgagtcggggtgtcatattcaacgtgagaggtgttgatggtgataccacgagctttttcttccggcgcgttatcgatctggtcgaatgcgcgagcggaaccaccgtaggttttagccagaacggtagtgatggcagcagtcagggtagttttaccatggtcaacgtggccgatagtaccaacgttgacgtgcggttttgtacgttcaaatttttctttagacacggctatattccttactatagtgctctccccttcggagagagcacgggacttaggttttaatcctgtggattatttaccacgggcttcaataacggcctgagcaacgttgttcggcgcatcatcatacttcaggaattccatggtgtatgatgcacgacctttggtcagagaacgcagctgagttgcataaccgaacatttcggacagcggtacttcagcgtggatcttaacgccggttacttcggattcctgaccgcgcagcataccgcgacgacggctcaagtcaccgataacgtcaccagtgttctcttccggagtttctacttcaaccttcatgatcggctcaagcagaactggttttgctttcttaaagccttctttaaaggcaatagacgcagccagtttaaacgccagctcagaggagtcaacgtcgtggtaagaaccgaagtgcagacggatacccatatcaactaccgggtaacctgccagcggaccagctttcagctgttcctggatgcctttatcaacggccgggatgtattcgccaggaattacaccacctttgatgtcgttgatgaactcgtaacctttcgggttagagcccggctccagcgggtacatgtcgatcacaacgtgaccgtactgaccacgaccaccagactgcttggcgtgtttaccttcgatatcggtaactttcgcgcgaatcgcttcacggtaagcaacctgaggtttaccgacgttcgcttcaacgttgaattcacgcttcatacggtcaacgatgatgtcgaggtgcagctcacccataccggcgataatggtctggttagactcttcgtcagtccatacgcggaaagacgggtcttctttagccagacgacccagagccagacccattttttcctggtcagctttggttttcggctcaacggcgatggagattaccggctcagggaattccatacgctccagaatgatcggcgcatccgggtcacacagggtgtcaccagtggttacgtctttcagaccgatagcagcagcgatgtcgcccgcgcgaacttctttgatctcttcacgtttgttagcgtgcatctgaacgatacgaccgaaacgctcacgtgcagctttcacggagttcagtacggtatcaccagagttaaccacaccggagtacacgcggaagaaggtcaggttacccacgaacgggtcggtagcgattttgaacgccagtgcagagaacggctcgtcgtcgcttgcgtgacgctcagccggggtatctttaccgtcgtccaggataccgttgatcgcaggtacgtcaaccggggatggcaggtaatcaattaccgcatccagcatcgcctgaacgcctttgttcttgaacgcagaaccacaggttaccaggatgatttcgttgttcagaacgcgctgacgcagagcttttttgatctcttcttcagtcagttcttcaccacccaggtatttttccatcagctcttcagaagcttcagctgcggattcgatcaggttctggtgccattcatcagccaggtcctgcatgtcagccgggatatcttcgtattcgaaggttacgccctggtctgcatcgttccagttgatggctttcattttcaccaggtcaacaacgccggtgaaaccttcttcagcaccaattgccagctgcagcggaaccgggttcgcgcccagacgggttttgatctgaccaacaactttcaggaagttagcgcccatgcggtccattttgttaacgaacgcgatgcgcggaactttatatttgtttgcctgacgccatacggtttcagactgcggctgaacaccaccaactgcgcagtaaaccattaccgcaccatcaagaacacgcatggaacgttctacttcgatagtgaagtcaacgtgccccggggtgtcgatgatgtttacacggtgcggttcatactgtttagccataccagaccagaatgcagtagtcgcagcggaagtgatggtgataccacgttcctgctcctgctccatccagtccatggtagcggcgccgtcatgaacttcaccgattttgtggtttacaccggtgtagaacagaatacgttcggtagtagtggttttaccggcgtcgatgtgcgcactgataccgatgttacggtagcgtgcgatgggtgttgtacgagccatttgattcctcgtttatttctttaggcgttcagttaagttatccagagcgggcgactcatctgaaacgcccgcctggtgactatgactccgaagggattaccaacggtagtgtgcgaacgccttgttggcttcggccatacggtgaacgtcttcacgtttcttaactgcagtacctttgttgtctgcagcgtcagtgagttcgttcgccaggcgcagagccatggatttatcaccgcgtttacgagcagcttcaacgatccaacgcattgccagggcattacgacgaaccggacgtacttcaactggaacctgataagtagaaccacctacgcggcgggacttaacttcgacagtcgggcgcacgttttcgagcgcaacttcgaaggcttccagttcagttttaccagagcgctgagccagggtctccagcgcgctgtatacgatagtttctgcagtagattttttaccatctaccatcaggatatttacaaatttagccagcagttctgatccgaacttcggatccggcagaattttacgctgaccaatgacgcgacgacgtggcatggaaatactccgttgttaattcaggattgtccaaaactcaaagagtttagtttgacattaatataaaacgtttggccttacttaacggagaaccattaagccttaggacgcttcacgccgtacttggagcgagcctgcttacggtctttaacgccggagcagtcaagcgcaccacgaacggtgtggtaacgaacacccggaaggtctttaacacgaccgccacggatcaggatcacggagtgctcctgcaggttgtgaccttcaccaccgatgtaggaggtgacttcgaaaccgttagtcagacgcacacggcaaactttacgcagtgcggagttcggtttcttaggagtggtggtatatacgcgagtacatacgccacgtttctgcgggcaggcttccagcgctggcacgttgctctttgcaactttgcgcgcgcgtggtttgcgtaccagctggttaattgttgccattaaatagctcctggttttagcttttgcttcgtaaacacgtaataaatcgcctcatatattatgaggacgcagaattttagggcggtgccgaaaaggtgtcaagaaatatacaacgatcccgccatcaccaggccaactgaccggcatgtttgactgtgagtctgacgaaatcagtatagctaaccctgccgacactgtccgcaatttgaccagccagcccgcgggcgtcaacgtcgtcttgcagcacgtatagggttatgggggcggattgcaggatctcaaggaagcgaccatcggcgatggccgcggtgacgccgtcagacagtagtaccagatcgtcgccgtgctccatcaaacgaagcatcgctgcgatgtcggcatgccagggggaaacactgagcgtatggagcatgggggcctcagaaacgcaaaatcacatcaaattcatgcagacgggcgcgcagggcatccggcgccaggcattcgacatccaccacccacggggtcgcgggatccaggccgcgctctcgcgctgagtcggcgcacagccagcactggtcgatatcatatagcgacagcaatttaaaggtagcgatgtagtcgcgggccagcacagcgccaggccgctgttcgggtaacagctgaaacacgccgtcgcccacaaaaaacacgccaatatcgtcggtgagcgcggaggttgctaataaggcatcgaggccttccctgccggcggcgctgccgtgcggcgcagaggaaaatacaaaagccacacgtttcatcagaactgcaccatccgatcgcaagtaagcgccgcttccgctagcgcgccgagcccgctcaaggtaaaacccggctgcaaattgtggccaggcagagcgagctgttgcgcttcgcgttcgtccgttacgccacgacgcagggcggccgccacgcagatatgcagcgcgacgccgtgctcatcgtggagggattgccacccgcgcaccagatcgaactcatcgctggcgggcgccgtcaactggttagcgttaagcacgccttcgcgatagaaaaaaacgcacgccagctcatggccttcctgcagcacggcctgggcaaattgccaggcgctgctcgcctgctgcgtgccataggctgggccggtcaccgtgagggcaaaacgcattacttatccagcccctggaaatcgccgcttttgaactggcgaatatagaggtagacggtgtgcttggagatgttcagacgatcggctacctggttaatagcgtctttaatatcgaagatccctttctcgtagagattcagcacgatttgacggtttttcgcattgttagacacgctgcgatcggcattcacctcttcaatggtgaactccagcgtctgggcgaccagatcgtctaccgaagaagcaaagttcaccggcgagttcacttcaggcgtttctggcggaataaaggtgctcatgatctgggaaaacggcacatccagattcatgttgatacacagcagaccaatcacccggtgatcgcggttgcgaatggcaatcgtcaccgacttcatcagtacgccgcttttagctcgggtaaagtagcatttggaaacgctgctatcggcgcccgtcatatcgtgcagcatgcgcagcgcaagatcggtaatcggtgaaccgatttggcggccggtatgttcaccattggcgatacggatggcagagcatttcagatcctgcaaagaatgcagcacgatttcacagtgcgaaccgatgagcatcgccaacccgtccactaccgcttcataagatttgagaatatcgaaatcggtctggtcaaagggacgttgatccagcaggtcaagctcgctggtttcattggttaaaagcgacctggacatgaaaaaaagcactccttttcaggagcctgtcgttattgtcagggcaggctcatcatcattattaagctatctaaagtaatacagcgcctgaggatctttccagttttaattatatctgcgctcaataaaaaagccgccgcctctgacgagacggcggcctgaacctgattacttcttagcgtcagctttcgcgtccgcggctttcgcatcgcctgcggcttccggctgtgcatctgccttcggcgccggtttgatatccagcagttctacatcaaagaccagcgtagagttggccgggatgcccgggacgccagttttaccgtaggccaggtccggcggaataaccagcttgattttgccgcctttcttgatgttcttcaggccttcagtccagcccgggatcacgccgtcgagacggaaagagagcggctcgccgcgagtataagagttatcaaactctttaccgtcgatcagggtacctttgtagtttaccaccacggtatcgctgtctttcggcgcatcgccagcgccttctttctcgactttatacagcaggccagtttttgaggttttcacgcccttctctttggcaaagttgtcacggaaagctttgcctttggcttcgttctcagtggcgtctttttccattttctgctgagccgcggtcttcacgcgcgtttcaaaggcctgcagagtctgttcgatctcctggtcggacagtttgctcttatcggcaaacgcgtcctgtacgccggcgatcagctgggctttatccagcttaatgcccagcttctcttgttctttcagggagttttccatgtaacgccccagggacgcgcccagcgcataggccgatttctgatcgtcatttttaaatgccgatttactctcagccgccggggctgccttcgttgccgtatctgcagcgaaggtcagcggtgcattcagggcgacggccattgtggccgtcagcagcgttactttaaacagtgatttcatccatttctccagggccggggcctctcgccccagggttatcgtaaaaagcaaaaaacgtactatagaacgttgccgttaaaatctacatacggacgttcctgaatatcgcctcttttaggactatttttgtatgaataagtttcctgtacggcgcagcgatgctgcgcgccaggggaaacttaagtagaatccgcccgcaggatcagactaaagaggttacccatgcacgatagcacattagaaacgcgccttgcggagctggaaagccggctggcgtttcaggaaatcaccatcgaagacctcaacaaaaccgtgaccgcccacgagatcgagatggcgaagatgcgggagcatatgcgtctgatgatcgagaagctgaaggcgacccaaccctcccatatcgcctcccaggcggaagagacgccaccgccgcactattgaggcgtaaaaaaagcgggtttccccgcttttttgtcgtcttcgtgccgaagcgcaaagattagtggcagccgcagccaccgtggccgccgcagccgcctttaccatggtcgtgaccatgatcgtggccgtggccgccgcagcaaccgtcatgaccatggtcatgatcgtgatcgtggccatgcgcgccgtgcacgtgaccgtgctccagctcttccgcagtcgcttcgcggatggcgacgacttccacattaaacttcaggttctggccagccagcatgtggttgccatcaaccacaacgtggtcgtcttcaacttcagtgatttctactggtaccggaccctgatcggtttccgccaggaagcgcatgccaacctgcagttcatcaacgcccatgaagacgtctttcggtacacgctgcaccaggttttcgtcatactgaccgtaagcgtcgttagcgccgacggcaacgtcaaatttgtcgcccacttcgtggccatccagcgcgttttccaggccggaaatcagggagccgtgaccgtgcaggtaatccagcggcgcgcttaccggagactcatcaaccaacacaccgtcttctgtacgtacctgataggccaggctgaccaccaggtcttttgctactttcatgatatctcctgagatgggaagaatagtggcgcagattgtagcggaattctgctgccgtgtaccctttagcttaaaaaaagccgacggataacgctagtcgggatgaaaaatgccaatcacctgctcctctttgcgtacatgctcacgggcctctttatctgcctcacgcatctgatgaccgcacttaacgcactcaacaacatcgacattattctcacgccacattgccagcgaatcctgcgcctggcacgccggacatttcgccccggcaataaaacgtttacgcactgccataagatttacctttattcaaactcgtcccagccgtccagctgccggctctctttctgcatttcgcgctggaaaatctcttccagttcgcgccgggcctcccgcacgcgtgatatctgtaccgtatcagtatgcactggcattagctcgcgcagcattcgcatatcgaggcgtcggaagtgcagctgcgcgcgctgggcctggtgaggatgcatcccgagggtgatgagcgctttgcgccccagctccaacgcactggagaaagtttcacgagaaaactgcgtcacgccggcctgcagcagctcatgcgcctcaacgcgcccgcgagcgcgggccagaatatgcagatgtggaaagtgttgttgacacatttccaccagccgcatggtatcttctggctcattacaggtgatgacgatcgactgcgcctcttccgctcccgccgagcgcagcagctccagctgggtggcatcgccaaaatagactttatagccatagttgcgcatcagatttaccgcgctgatgtcccgctccagtaccgtaatacgcatcttattggccatcagcaggcgaccaatgacctgaccaaagcgaccaaacccgacaataatcacctgtggcttgtcatcttccacccacggcgcctcaccggtatcgtccgccgggttcagccgtcgcgacaatagcttatctatccccttcatcagcagcggcgtcgtcatcatcgacaacgttaccgccaccagcagcagcgccatctggtcgtgcagaaacaaccgctgagaggcgggcagcgaaaagaggacaaacgcgaactcgccgccctggcttaatacgcccgcgaactgcatccgctcggaacttcgcaggccatagagacgggccagcagatagagcaccagcatttttaccgccaccagcaccgccacgctcaccgccacccacagcagatgggtatacagtacgccaaggttcagcgccatgccgacggaaataaagaacaacccgagcagcagccccttgaacggatcgatagcgatctccagttcgtggcgatactcactttccgccagcagcacgccggcaataaaggtgcccagcgccatcgacagccccagcgcctccataaacagggctgatccgaggaccaacagcagcgtggcggcagtgaacacctccctgacccccgagctggcgataaaacggaacaccggccgcagcagatagcgtccgccaatcagcatcccggcaaaggccaggaccttcatgccgaccgtcaaccagttcacatgctcatccgctgaaccggccagcaggggcaccagcgccagcgccgggatcaccgccagatcctgaaacagcagcaccgaaaagcctagctgtcccgcttcgctgcggctcattcccttctcacgcatcagctgcagcgccatggcggtggaagacatcgccaggccgatcccgccgaccaccgccgcctgccatgaaaacccggtcgtcatcagcaacccaccgaggatcgccgcgctgagcatcacctgcgccgcgccaacgccgaagatggagctccgcagtcgccatagcttggcgggattgagctccaggccgatgataaacatcagaaacactacgccgagctcagagaaatggagaatttcatccacatcgctgataaacccgagcccccacggaccaatggcgatcccggccagcagatagcccagcaccgcgccaatccccagtcttgaagccagagggacggcgatgacggccgcgaacaaaaacaacacccccgccagcagcaaatcagatcccgccatggacacctccggcggcgatggggttggccaaccagtcccggtaggccagggcgcggctgcgcagctcctctggctgctgcctccgggcccagtagacgataatggggctcatccagtgcatacggcacatgccggcggtcagttcaaaaggacgtaaaatatcgttcatcggatagcgattagcatcgcgacggtaggcgctctcaggctcgccggtagtgatcacactgcgccagtactttcccgccagttcgttccctccggcgccgctggcgaagccgcggcttaacacacgatccagccactccttaagcagcgccggacagctccaggtatataaagggtgctggaaaacaatcacctcatgccggcgcagcaggtcctgttcgtaagcaatatcgataaaaaaatccggatagtgcgcgtagagatcgtgcacggtgacgttcggcaactgtaaggccggctctaataaaacccggttggccacggaatcctgagattctgggtgggcatacagcagcaacactttcgctgtctgagacatcattcccctcccgtaggtcttctggcggcctgcacagccccggcgttttgacacagccagaatgactttgtgtatcgtcttcgttttgggctaccatggcggcccggtgaagcgattcgcttccacactacattatcataatgacaaattaacatagtctgaacatacggcgccttatgattgttttctcctcgttacaaattcgtcgcggcgtacgcgtcctgctggacaacgccaccgctaccatcaatcctggccaaaaggtcggtctggtggggaaaaacggctgcgggaaatcgacgctgctatcgcttttgaaaaacgagataagcgctgacggcggcagtatgacctttcccggcaactggcagctggcctgggtgaatcaggaaaccccggcgctaccgcagccggcaatcgattatgtcattgacggcgatcgagagtatcgccagctggaggccgcgctccagcaggctaacgaacgcaacgacggtcatgctatcgccaccgtccacggtaagctggacgccatcgacgcctggacgatccgttcgcgcgccgccagcctgctgcacggtctggggttcagcaatgaacagcttgagcggccggtcagcgatttttccggcggctggcgtatgcgccttaacctcgcccaggcgctgatctgccgctccgatctgctgctgctcgatgaaccgactaaccacctcgatctcgatgcggtgatctggctggagaagtggctgaagggctatacgggaacgctgatcctcatctcccacgatcgcgattttctcgatcctatcgtcgacaaaattatccatatcgaacagcagaccatgtttgagtacaccggcaactacagttcgtttgaagtgcagcgcgccacccgcctcgctcagcagcaggcgatgtacgaaagccagcagcagcgcgtcgcgcacctgcaaagctatatcgatcgcttccgtgccaaagccaccaaggccaagcaggcgcaaagccggatcaaaatgctggagcggatggagcttatcgctccggcgcacgtggataacccgttccacttcagcttccgccagccggagagcttgcctaacccgctgctgaagatggagaaagtcagcgccggctacggcgagcgtataattctcgactccatcaagcttaacctggtgccgggctcgcgtatcggcctgctgggccgcaacggcgccgggaagtcgacgctgattaagctcctggcaggcgagctccagcccgtaagcggcgagatcggcctcgcgaaaggcatcaagctcggctacttcgcccagcatcagctggaattcctgcgcgccgatgagtcgccgctgcggcacctggcgcgtctggcgccgcaggagctggagcagaagctgcgtgattatctcggcggctttggtttccagggcgataaggtgagcgaagaaacccgccgcttctccggtggagaaaaggctcgcctggtactggccctgatcgtctggcagcgccctaacctgctgctgcttgatgaaccgaccaaccaccttgacctcgatatgcgtcaggccttaaccgaagcgctgatcgactttgaaggggcgctggtggtcgtatcgcacgatcggcacctgatccgttccaccactgacgatctgtacctcgtccacgatggtaaagtcgagccgttcgacggcgatctggaagattatcagcagtggctcagcgactcgcaaaaacaggagtcccagagcggcgaggcgccaaaagagagcggcaatagcgcccaggcgcgcaaagaccagaagcgtcgggaagcggagctgcgcagccagacccaaccgctgcgcaaagagatcgcccgtctggaaaaagagatggacaagctcaacgcgcagttggccagtgcggaagaaaaacttggcgacagtgagctttatgacgcctcacgtaaagccgagctgaccgaatgcctgcagcaacaggccagcgcgaagtccgggctggaggagtgcgagatggcctggctggaggcccaggagcagctggagcgcatgcttcaggaaggctaaactcttcctcttcatcctgcctgcgcgtacgctgccgctggcagggtgggtttctgccctcttcatggcctggccatcagcgacatcaatgatttgtttttgctgtaagctggcgtcactggccgcaagaccacatattggctaaccccctgcatgccctgcgcggtatagtcatcatcacgtttattaattgttctggtgctatggttgaaatcatccccacagacatgacgccccccgaaaacgattcgcgtgagttccatccgatgcgcggcgtgggcaatcgtcatctgcaaaccatgctgccgcggctgattcgccgtaaattgcgctttaccccgcactggcagcgccttgagctgccggacggcgattttgtcgatctggcctggagcgaagacccgcaccaggcgcgccataagccgcgcctcgtcgtttttcacggcctggaaggcagtctgcacagcccgtacgcccatggtctgatccacgcggcgatgcagcgcggctggctgggcgtggtgatgcatttccgcggctgcagcggcgaacctaaccgcaatcaccgcatctatcactccggcgaaacggaagatggcacctggtttttgcactggctgaagcgcgagtttggtcccgcgccgaccgcggccgtcggctattcgctgggcggcaatatgctgggctgcctgctggcagaggaaggcgaccgctgcccgctggatgcggcggtgatcgtctccgcgcctttcatgctcgaagcctgcagctatcatatggataagggcttctcgcgagtttatcagcgctatctgctcaatctgttaaaagccaacgcttcacgcaagctgaaagcgtacccgggctcgctgcccgtcgatttacgccagctcaaagggatgcgccgcatccgggaatttgacgatatgatcaccgccaaaatccatggctttgccgatgcgctggattattaccggcaatgcagcgccatgccgcggctcagcgatatcactaagccgacgctcatcattcacgcgaaagacgatccgtttatggatcaccactcgattccgccgcaggagcaactgcccgcgaacgtagagtatcaattgaccgagcaaggcggccacgttggctttgtcagcggcactctgcgtaaaccggagatgtggctggaaagacgcattcccgactggttaaaccgctggctggaggttcccgtatgattattccctggcaggatctggatcccgaaacgctggataacctgattgaaagctttgtgttacgtgaaggcaccgattatggtgaatatgaacgttcacttgccgataaagtcgccgatgtaaaacagcagctgaaacgcggagaggcggtccttgtgtggtcggaactgcatgagacggtcaatattatgccgcgcgcgctgtttaacggctaaggcgacgccactacatcgtttaaccagggagttgttatgtctgccaaacatccggtgatcgccgtcacgggctccagcggcgcgggcactaccaccaccagccttgcctttcgcaaaatcttcgcgcagctaaacctgcacgccgcggaggtggaaggcgatagctttcatcgctacacccgcccggaaatggacatggcgatccgtaaggcgcgggatcagggtaaacatatcagctactttggcccggaggcgaacgacttcggcctgctggagcagacctttgtcgactatggtcgccacggcaaaggtcagtcgcggaaatatctccacacctatgacgaagccgtgccgtggaatcaggtgccggggacctttaccccctggcagccgctgccggagccgacagacgtgctgttctatgaggggctgcacggcggggttgtcacgccgcagcatgatgtcgccagccatgtcgacctgctggtcggggtggtgcctatcgttaacctcgagtggatccaaaagcttattcgcgacaccagcgaacgcggccactcccgggaggcggtgatggactcggtcgtccgctcgatggaagattacatcaacttcattaccccgcaattttcccgcacccatatcaactttcagcgcgtgccgacggtggacacctccaacccgtttgccgccaaagcgatcccctcgctggacgagagctttgtagtgatccatttccgcaatctgcagaatatcgatttcccctggctgttggcgatgctgcagggctcgtttatctcgcacatgaacaccctggtggtgccgggcggtaaaatggggctggcgatggagcttatcatgacgccgctggtcgagcgcctgatggaaggccgtaagataggctaaccaaaaaaccccggcctggccggggttgagattcgatacaacggcaggcgaagactacgcctcgatcacttcataggagtgagtgatgttcaccgctttttccagcatcagcgccaccgagcagtatttctctgccgacaggtccaccgcccgggagaccgcggcatctttcagcgccttgccggtgacgataaaatgcagattaatatgcgtgaacagacgcggagcctcttcgcgacgctcggaggtcagcttcacttcgcaattggtcacgtcgtgacgacctttttgcagaatggagaccacatcgatcgcactgcaaccgcccgccgccatcagcaccatctccatcgggctgggagccttatccccggagttgccatccatcagaatctggtgtcccgatgcggactccccgataaaggttaacccttctacccatttcacacgcgcttgcataaaatttaactccagtatcgcaatattcctgtcagattacgcgcacataacaattctcgcaacggaaggcgacctgcgtcatgctgaagcgagacaccaggagacatgcggcgaaagctatgctaaaacagtctggatgctacagtaatacattgatgtactgcatgtatgcagaggagttcacattacgggctgtcgaaaaatcatcagccagcttcccaggtatagggaaacaatacgattgcatgcccggacgccgtgtagtgtcggcgcccggagatagcttataacagaggataaccgcgcatggtgcttggcaaaccgcaaacagaccctacccttgaatggttcttgtctcattgccacattcataagtacccatcaaagagcacgctgatccaccagggtgaaaaagcagaaacgctgtactacatcgttaaaggctccgtggctgtactcatcaaggatgaagaaggtaaagagatgatcctctcttacctcaaccagggcgatttcatcggtgaattaggcctgtttgaagagggtcaggagcgtagcgcctgggtacgggcgaaaaccgcatgtgaagtggccgaaatctcttataagaaattccgtcagctgatccaggtgaacccggacattctgatgcgtctctcttcgcaaatggctcgccgtctgcaggtcacgtctgagaaagtgggcaacctggccttcctcgacgtgacgggccgtatcgcccagacgctgctgaacctggcgaagcaaccggatgccatgacccacccggacggtatgcaaattaaaattacccgccaggaaattggtcagatcgtcggctgctctcgtgaaaccgttggtcgtattttgaaaatgctggaagatcagaacctgatttccgcgcacggtaaaaccatcgtcgtctacggcacccgttaagttgctaagcggcgtattgctcccgcagtacgccgtttttgtttttccctcatgtggcgcaggctgatttaccacccggaagtcaactatgcactgcggcaaacgctggtgctgtgtctgcccgtggccatcggtcttctgctcggccatctccagcaggggctgttattttccttagtccccgcctgctgcaacattgccggtcttgataccccgcataagcgctttttcaaacgcctgattatcggcggctgcctgtttgccggatgcagtctggtggtgcagttgctgcttgcccaggcgatacccctgccgtttattctcagcggcctggcgctcttgctcggcgttaccgcggagatcagttcgctgcacgcgcggctgctgcccgcgtcgctgatcgccgccatctttaccctgagcctggcgggcaatatgcccatctgggagccgctgctgatctacgccttcggcacgctgtggtacggcgtgtttaactggttctggttctggctgtggcgcgaacagccgctacgggagtcgcttagcctgctttaccgggagctggcggactactgtgaagccaaatacagcctgctgacccagcataccgatccctcgaccgccctgccgccgctgctcacccgccagcagaaagtggtcgatctgattacccagtgctatcagcagatgcatatgctggccgctaaccaacgcaacgatcataagcgcctgctgcgggcgtttcagatggggctggatctacaggagcatatttcggtcagcctgcatcagccggaagaggtgcaaaagctggtggaacgcagccatgccgaagcggtgatccgctggaacgcgcagaccgtcgccgcccgcctgcgcgtgctggcggatgacatgctctatcatcgctttccaaagcgctttcagatggataaacagatcgaggctctggaaaagatcgccagacaacatccggataacccggtcggccacttctgcgcctggcacttcagccgcatcgcccgggtgctgcatacccagcgcccgctgtatgcccgggacctgatggccgacaaagagcgtcgtttaccgctatttcccgcgctaaagaactacctgtcgctaaaatctcccgcgctgcgcaatgccgcccgcatcagcgtgatgctgagcgtcgccagcctgatgggcaacgccctgcacttgcctaagccctactggatcctgatgacggtgcttttcgtcacccagaacggctatggcgccacccgggtgcgtattgttcaccgggcggcgggaacgctcgccggcctgacgatcgccgggcttaccttgcattttcacgttccggagagctacaccctgagcgggatgctgctgattaccctgctcagctatctgatcattcgcaaacactatggctgggcgatggtaggctttacggtgacggcggtgtataccctgcagctgctgacgctcaacggggaacagtttattatcgcccggctgatcgacacccttatcggctgcctgatcgccttcggcgggatggtctggctgtggccgcagtggcagagcggcctgctgaaaaaaaatgcccacgatgcgctggaggccgaccagcaggcgattcgcctgatcctcagcgccgatccaaaagcccccgcgctggcctatcaacgcatgcgcgtcaaccaggcgcacaacgcgctctacaactccctgaatcaggcgatgcaggaacccgggtttaatacccactatctggaagatatgaagctgtgggtaacgcacagccagtttatcgtcgaacacatcaacgctatgaccaccctggcccgggagcatacgatgctgaccccggatcttgcccagcgctatctcgaatcctgtgagattgcgctgcagcgctgccagcagcggctggacagcgatggtcccggcagcgcaggggatgccaatattatggagtcgccggaaagcgaggcgccgatcggtccgttaagcaccctggagcagcatctgcaacgcattctgggccatctgaacaccatgcacaccatttcgtcagtggcatggcgtcagcggccgcaccatggcatctggctgcggaagatcaaccgttaatcacctttgccaccgcctgggcaaagcgcgccatcccctcggcaatatcctgctcgtcgatgatcagcgagggaacaaaacgcatcacgtccggcccggcgttgagcaccatgacgccggcgtcggccgcggcatagaggaaatcacgcgcgcggcctttgtgctgcggcttgagttccgcgccgatcagcaggcccatcccgcgtatatcactgaacagatcaaactcggcatccagccgctgcaggtgtttgacgaacagttcgcgcttcgcgctcacgccatccagcaccgccggggtattgataagatcgaaggcggcgttggcgaccgcgcaggccagcgggttgccgccgtaggttgagccatgggagcccgcatggaaggcgctggcgatctcgtgggtggtcagcatggcgctgaccgggaagccgccgcccagcgctttggcgctggtcagaatatccggggtcacgccgtagtgcatataggcgaacagcgatccggtacgccccataccacactgtacttcatcaaagacgagcagcgcctggtgctgatcgcacagctcgcgcagtccctgcaggaaagccggcgtggccgccgtcacgccgccttcgccctgaatcggctccaccaccaccgcgcaggtgtggtcatccatcaccgcttttaccgcctgcagatcgttgaagggaacatggacaatatccgccggttttgggccgaaaccatcggaatacttcggctgaccgccgacggaaacggtaaacagggagcggccatgaaaggcattatggaaggcgatgattttggttttatacgggctatggcgggtcaccgcatagtgacgcgccagcttaaaggccgtttcattggcttcggtgccggagttcataaacaccacgcgctcggcgaaggtagcctcgacaagtttacgtcccagacgcagcgccggctcattggtaaagacgttgctggtgtgccacagcgtttcgccctgctgatgcagcgccgccaccagcgccggatggcaatggccaagcgccgtcaccgcgataccgccggcgaaatcgatatactctttcccctgctgatcccagacgcggctgcctttccccttcaccgggatgaattctgccggtgcataaattggcaaaataacttcatcgaatgtggcgcgggtgattgccggttgttcagttgccatgtcttgcccatccctcttcgttacgcagatgcgattatgataatctaatcacaaaatatgcataaaaaatcagtcaatagcaactgaaaatcaccgtttcaaaaagttggccagcaattgatggccctgctcgctgaggatgctttccggatgaaactgcacgccctcgagatcccattcgcggtgacggatccccataatctcaccgctggcgctgcgggcagtgacgttaaactcggacgggagcgtcggcgggtcaatcaccagcgagtgatagcgggtcaccgtcaggggattattcagcccctgaaacaccccttcgccgttatgctcgataagcgaggttttgccatgcatcacctgggccgcccgcacgatagtcgcgccaaacgcctgggcgatcgcctgatgcccgagacagacgcccagcagcggcgtttttccggcatagtggcggataaccgcgagggaaatccccgcctcatccggcgtgcaggggcctggcgagatcacgattttctccggcgccagcgccgctatctcctccagcgtcaacgcatcgttgcgcctgaccagtacttccgcccccagttcgcagaagtactgatacagattccaggtgaaagagtcatagttatcgataagcaggatcatagcggctccggaacaatcaaaaccgggctattctactcagattcccgcgcttcgcttaccactttgcgaaagatcgccaccagcggggccagatcgcccatcgcgctctgctggcaggccgcactccagccggcggggtcaacgtcacgccagttaagaaggtagccggcatgtatcgccagctgttcaaagaaaatacgctgggtcaggccattgccaagacgaaaagggtgcagcacattaatttcaccatagaaccagctcaggcgttcgatgaaggtatcgcgcggcaggccattgagataatcctcctgctcaagggcctgcatcagggcattcccctcctcctcgatccgggcaaagtggcagaacggcgtatcgcccaggtagaggttcacttcacgcaagcggcccgcccagtcaaacagatcctgatacaactgatgatgaatagcgcacagatagggtaagccgcgcacccgcgggcccagcggcagagtggccgcccgcagcgctgtcatctcaaaggcggcctgctgcagatttttagcctggcggatgccgagacggttgcgcagcacgttcagcgccggatagagataaggatcgcgttcatcgccgaatttatcgctcatactccctccgcaacgtcgccagacgcgccagcgcctcttcggcagtcagcgtaaccagcggcaccgtcacgccttcaaggcgacggctggcctgaaaattggtattgcgtgtctgttcccagagtcgggatttttgcttatcggtgagtggacgcatcgtcgccccccatatcgtcccctgtgtgccacaagtataagcagcaatttcaggttatgccgggaggcgaccgggcgcggcgatagaccaccgcgccgcgggaggattagggcagcactttcgcagagaggataacgaccggtttggtcggcacattctgatacggaccaacgttatgggtctggacctgggagatcttatccgcaacatccatccccttcaccactttgccgaataccgcatagccaaagtcgcgctggccatggtcgaggaaggcgttatccgccacgttgatgaagaactgactggtggcgctatcctgatcggcggtacgcgccatcgcgatggtgccgcgggtgttgcgcaggccgttgtctgcttcattcttgatcggcgggttaggctgcttctgctgcatctgttcgttaaagccgccgccctgcaccatgaatcccgggatcacgcggtgaaaggtggtgttgttgtagaagccgctgttgacgtacttcaggaagttatccacggaaatcggggctttctggctgtttaactcaagctcaatgttacctgccgaagtggtcagcagcacatgcggatcgccctttgccgccatggccggggagaacgctgaaatagcgaaaacggcagccatcgccgccagtgttgatttgagcatggaaattccttaacggagcagaataaaagcgagtgccttgattctaaagagcctttgcatcctgggccagccttttaccaaattttacttagctgtaataattgtaaccgcgcaaacgatctcctttgcagcgaacaagcgtgatgcagatcacattaaaacatgcaaaagataacccatttcacaataaacatttaattacatcacctgaacgaataaaatctgtccgcccggcgcagcgtcaacgcgctttacctttctattcacaggccagtcatgactaacagcaaccgtattaagctcacatggatcagcttcttctcctacgccctgaccggcgcgttggtgatcgtcaccgggatggtgatgggtaacattgcggattatttccatctgcccgtttccagtatgagcaacacctttacctttctgaacgccggtattcttatctccatcttcctcaatgcctggctgatggaaatcgtgccgctgaaaactcagctgcgctttggctttattttgatggtgctggcggtggccggcctgatgctcagccacagcctggcgctgttctccgcgtcaatgttcgttcttggcctggtgagcgggatcaccatgtcgatcgggaccttcctgatcacccatatgtatgaaggccgtcagcgcggggcgcgtctgctgtttaccgactccttctttagcatggcgggcatgattttcccgatggtcgccgccgtcctgctggcgcgcagcatcgagtggtactgggtctacgcctgtattggtctggtatatgtcgctattttcgtcctgactttcggctgtgattttccggtgctgggcaaaaaagcccagagcgaaaacagccagccggtggtgaaagagaagtggggcatcggcgtgctgttcctctccgttgcggcgctgtgctacatcctcggtcagctgggctttatctcctgggtaccggaatatgcgaagagcctgggcatgagcctcggcgacgccggtaaactggtgagcgatttctggatgtcctacatgatcggcatgtggtcattcagcttcatcctgcgcttcttcgacctgcagcgtatcttaaccgtcctcgccgggctcgcgacggtgctgatgtacctgtttatcaatggttcgccggagcatatgccgtggtttattctgaccctgggcttcttctccagcgccatttacacctcgatcattacgctcggttcacagcagacgcgggtcgcttcgccgaagctggtgaactttatcctcacctgcggcaccatcggcaccatgctcactttcgtggtcaccggcccgattgtggcggccagcggtcccctggccgcgctgcacaccgctaacggcctctatgccgtggtattcgtaatgtgctttatcctcggcttcgtctcccgtcatcgccagaacaacgctcaggcggcgtctcactaagccttcggcccctttgcatccgcaagggggctgttcctcataaaagaaagctcctcgccaccgcggtcagtttggatccagctttgcgccggctgggtggtcgcgatcacccttccctggcgaattgaccagcgcaccggcacctggcagcggacggcctcaaagccattctccgccgggagaatgatcaggttagccgggttgccgctgacaatgccgtaatcctcgaggccaaacgtgcgggtgctgttgtcggtgataagctgcaggccgtcgttgatctgctggtagcccatcagctggcaaacatggagccccatatgcaggacctgcagcatattgccggtccccagcgggtaccacgggtcaaagacgtcatcatgaccaaagcaaacgttgatccccgccgccaacagctccttcacccgggtaatgccccgtcgcttcgggtagtcgtcaaaccggccctgcagatgaatattcaccagcggattggcgacaaagttgatgccggagagcttaagcaagcggaacagacgcgaggtataagcgccattataggagtgcatagcggtggtatggctggccgttacccgcggccctatccccgctttcagcgccagcgcggcaacggtttcaacaaagcgcgactgctcatcgtcaatttcatcgcagtgaatatccagtgggcggtcatattgctgcgccagacggaaggcgatatgcagcgattccacaccatattcacgggtgaactcaaaatgcgggatcgccccgacgacgtccgcccccagcttgagggcctcctccagcagcgcctcgccgttggggtaagagaggatcccctcctgtggaaaagcgacaatctgtaactcgacccatggcgccacctcctgtttgacctccagcatcgccttcagcgccgttaacgtgggatcggaaacatcgacatgagtgcggacaaactgcacgccattggcgatctgccacttcagggttttccacgcccgggctttgacgtcctcatggctgagcagcgctttccgctccgcccagcgctcaatcccctcgaacagagtaccggactgattccagttcggctcgccggccgtctgggtggtatccagatggatatgcggctcgataaaaggcgggatcgctagcccgccgcgagcgttcaatacctcatagctttcatcgtgcgcctcccccatcggcgtgatcgcgccaaagcggcccttatcaatggctatttgccacaggccgtcgcggtctgccaggcgtacgttctgaatcaaccaaagcggcgctgctgtcatatcaccctctctattcaatacggcttgttttctgtctaaccccaatcgcggcttacccaattcttgtacacaaaatcagcaaaaaggaaaagtcagcgttttccatgacttataaaaatactgacaaatcaaacgcatacccattaagtggtaggtgaagttgtcattgatttgcatcaataagcctgatggctgaatcgttaaggtaggcggtaatagaaaagaaatcgaggcaaaaatgagcaaagtcagaatcgctattatcggtaacggcatggttggccatcgctttatcgaagagcttctcgataaggcgcctgccggacagttcgacattaccgtgttctgtgaagaaccgcgtatcgcctacgaccgcgtccacctgtcgtcttatttctcccatcacactgcggaagaactgtcgctggtacgcgaaggtttctatgagaaacacggcgtcaaggtgctggtcggcgaacgggcgatcaccatcaaccgccaggagaaagtgatccactccagcgccgggcgtaccgtgttctacgacaagctgattatggcgaccggttcatacccgtggatcccgccgattaaaggcgcggaaacccaggattgcttcgtctatcgcactattgaagatcttaacgccatcgaatcctgcgcccgccgcagcaaacgcggcgcggtagtcggcggcggcctgctcggcctggaagcggccggagcgttgaaaaacctcggcgtggaaacccatgttatcgaattcgcgccgatgctgatggccgaacagctcgaccagatgggcggcgagcagttgcggcgcaaaatcgaaagcatgggcgtgaaagttcacaccagcaaaaacaccaaagagattgttcagcagggcaccgaggcgcgcaaaaccatgcacttcgccgacggtagcgagctgcaggtcgatttcatcgtcttctcaaccgggatccgcccgcgcgataagctggccacccagtgcgggctggcggtcgcccagcgcggcggcatcatggtcaacgatagctgccagacctccgatccggatatctatgccatcggggaatgcgccagctggaacaaccgcgtctacggtctggtcgcccccggctataaaatggcccaggtggccgtcgaccatctcctcggcagtgaaaatagcttcaccggcgccgacctcagcgccaagctgaagctgttgggtgtggacgtgggcgggatcggcgatgcccacggccgcacgccgggcgcccgtagctacgtctatctcgacgaaagcaaagaagtttataagcgcctgatcgtcagcgccgacaacaaaacgctgctcggcgcggtactggtcggcgacaccagcgactacggcaatctgctgcagctggtgctcaacgccatcgagctgccggaaaacccggattcgctgatcctcccggcccacgccggcagcggcaagccatcgatcggcgtggataaactgccggacagcgcgcagatctgctcctgctttgacgtcagcaaaggcgacctgatcgccgctatcaacaaaggctgccacaccgtggcggcgctgaaagcggaaaccaaagccgggaccggctgcgggggctgtattccgctggtcactcaggtgctcaacgccgagctggcgaaacagggcattgaggtcaacaacaatctgtgcgaacacttcgcttactcccgtcaggagctgttccacctgatccgcgtggaaggcatcaaaaccttcgacgagctgctggaaaaacacggtcagggctacggctgtgaagtctgtaagccgaccgtcggttccctgctggcctcctgctggaatgagtacatcctcaagccgcagcacacgccgctgcaggacagcaacgacaacttcctcgccaacattcagaaagatggtacctattcggtgatcccgcgctcagctggcggcgaaatcacgccggaagggctggtcgccgtgggccgtatcgcgcgtgaattcaatctgtacaccaaaatcaccggctctcagcgcatcggcctgtttggcgcgcagaaagacgacctgccggagatctggcggcagctgattgaagcgggattcgaaaccggccacgcctacgccaaagcgctgcgaatggcgaaaacctgcgtcggcagcacctggtgccgctacggcgttggcgacagcgtcggcttcggcgtggaactggaaaaccgctacaaaggcatccgcaccccgcacaaaatgaagttcggcgtctccggctgcacccgcgaatgtgccgaggctcagggcaaagacgtcgggatcatcgccaccgagaaaggctggaacctgtacgtttgcggtaacggcgggatgaaaccgcgccacgccgatctactggccgcggacctcgatcgcgagacgctcatcaaatatctcgaccgctttatgatgttctacatccgcaccgccgataagctgacccgcactgccccgtggctggacaatatggaaggcggtatcgactatctgcgcagcgtcatcatcgatgacaagctcggtctgaacgaccatctggaagaagaactggctcgcctgcgcgccgccttcgcctgcgagtggaccgagaccgtcaacaacccggcggcgcagacccgcttcaaacactttatcaacagcgaccagcgcgacccgaacgttcaggtggtgccggaacgtgaccagcaccgcccggccacgccgtatgagcgtatcccggttactctggtggaggaaaaagcatgagccagtgggtaaatatctgcagcatcgacgacatcctgccggccaccggcgtctgcgccctgctcggtcagcagcaggtggcgatcttccgtccctaccatgacgacagagtattcgccatcagcaacattgatccgttcttcaacgccagcgtactgtctcgcgggattatcgccgagcatgacggcgcgctatgggtcgccagcccgctgaaaaaacagcgcttccgcctgagcgacggcctgtgcatggaagatgccagccactctatcgcccgcttcgacgcccgcgtgaaagacggacacgttcagcttaaagcgtaagtacttctccctccccccggccacggggggagatataagtaacagttctgaccgacagcgcatgagtgcgggatatgtcgcatgttttgtattacctttgctgctattctacgaccactcgttttctaccccttatttttatgaggttattctgtggatcacttacccatattctgccagttgcgccagcgcgattgtttactggttggcggcggggatgtcgccgaacgcaaagcccgtctgctgctggatgctggcgctaacgtcacggtcaatgcgctcgacttcacgccccagtttcaggtgtgggctgattcacagatgctaactctggtgcagggggagtttatcccctcgctgctggataactgctggctggccatcgccgctactgatgatgagacggtcaaccagcaggttagcgaggcggccgaagcgcggcgtatcttctgtaacgtggtggatgccccgcgccaggccagctttatcatgccgtcgatcatcgatcgctcgccgctgatggtcgccgtctcctcgggcgggacatcaccggttctggcgcgcctgctgcgcgagaaactggagtcaattctgcccctgcatctcggccagctggcccgctatgccggccatctgcgcgcgcgggttaagcagcagtttgccaccgtaggcgagcgtcgccgcttctgggagaagctgtttgttaacgaccgtctggcgcagtcgctggctaatgacgatcggcaggcagtcgcggataccactgagcagttgctgacggagccgttggagcatcgcggcgaggtggtgctggttggcgccggccccggtgacgccgggctgctcacgctcaaaggcctgcagcagatccagcaggctgacgtggtggtctatgatcggctggtctccgatgacatcatgaatctggtgcgccgcgatgccgatcgggtattcgtcggcaagcgctcaggctaccactgcgtcccgcaggaggagatcaaccagatcctgctgcgcgaagcgcaaaaaggaagacgcgtggtccggctgaaaggcggcgatccctttatctttggccgcgggggggaagagctggagacgctttgcgaggcgggcatccccttctccgttgtgcctggcattaccgccgcctccggctgctccgcttattcggggatccccttgacccaccgcgatttcgcgcagggcgtccgcctggtcactggccacctgaaaaccggcggcgagctggactgggcgaacctggcggtggagaagcaaaccctggtgttctacatgggtctgaaccaggcgccggcgatccgcgagaagcttatcgctcacggcatggctgaagatatgcccgccgccatcgtcgagaacggcaccgctgtgacgcaaaaagtggtcagcggcaccttaggacaactggatattctggcgcagcagatggccagcccggcgctgatcatcgttggccgcgtggtcggtctgcgggataaactgaactggttttcgaaccattaaccttgcctcccataaagcgacaggcataaaaaagggcgggatatcatcacgcccttttagctgttgcgtcgcttacggcttggcgacaaagccaatcgcttcgtataccgctttcagggtttgagaagcccgcgcgctggccttttccgcgccgtctttcatcacctgattgagaaacgcttcgtcgttacggaaacggtgatagcgctcctgcaggtcaatcagcatgcccgataccgcttcggcgacttcgcctttcaggtggccatacattttgccttcaaaatgctgttccagctcaggaatagttttcccggtaaccgcggagaggatatccagcaggttggagacgcccgctttctctttcagatcgtaacgcactaccggcggctcgtcggagtcggtgaccgcacgtttaatcttcttgaccaccgatttcggatcttccagcaggccgatgacgttgttgcggttgtcgtcggacttggacatctttttcgtcggctccagcagcgacatcacgcgcgcgccggatttagggataaacggctcaggcactttaaaaatatcgccgtagatggcgttaaaacgctgggcgatatcgcggcttagctcaaggtgctgtttctgatcttcgcccaccggaacctggttggtctggtacagcagaatgtcagcggccatcagtaccggataatcaaacagaccggcgttgatgttctccgcgtagcgcgctgacttgtctttaaactgagtcatgcggctcagttcgccgaaataggtgtagcagttcagcgcccagcctagctgggcatgttccggcacgtgcgactgcacgaagatagtgcttttctgcgggtcgatgccgcaggccagatacagcgccagggtgtccagcgtcgccttgcgcagctgctgcggatcctggcgcacggtgatggcgtgctggtccacgatgcaatagatgcagtggtaatcgtcctgcatgtttacccactgacgcagcgcacccatatagttgccaatggtcagttcacctgagggctgtgcgccactaaaaacgatgggcttagtcatgtttcaattcctgagtttcactgtgcggtaacccgagagcgggtaagagttcgttaaactggtcgaagagatagtccggctcgctcagcgcaagcggttcaccatagttataaccgtaggtcagaccaacagagcagcagcctgccgctttgcccgcctgaatatcattgcgcgaatcgccgacaaacagcagctcggctggagccagagagagcttttccgccaccagcagcagcggttccggatgcggctttttattctgcacgtcatcgccgccaatcaccacggtaaaatatttcgcaatatcgagcgcgtccaacagcggggcgacaaacggcgtcggcttatttgtaaccagcgccagcggcaggcctttggcatgcagcgcgccgagcgtatcggccaccgccgggaacaggaaactgccctcttccgccgcttcggcgtaatagcggtcaaacagtttacgcaaaatgcgcagctgctcgtcttgcggaatatcatgatcgtcgacggaaggcttgcccatcgccgcacgtaacgttgctcgctcctgacgagcccaggtcagcgcccgctccatcaggacatcggcgccgttaccgatccaggtgataacgcgttcttctcccgccaccggcagctccagggcgtacagagcgttatcaaccgccgaggttagacccggcgcgctgtccaccagcgtgccgtcgagatcaaatgcgatgccgcggatcgcctgtaatttatccatgactcaccttcgctaattcactacgcatttgatcaatgacttgcttgtagtccggctgaccgaagatcgccgaaccggcaacaaacatatccgcacccgccgcggcgatttcgccgatattgctggctttcacgccgccatccacttccaggcggatgtcgtagccggacgcatcgatgcgctggcgcacttcacgcagtttatccagcgtctggggaataaaggactggccgccaaagcccgggttaaccgacatcagcaggatcacgtccagcttatccatcacgtaatcgaggtagctcagcggcgtcgccgggttaaacaccaggcccgctttacagccgtgctctttgataagctgcaggctgcgatcgacgtgttcggaggcttccggatggaaggtgataatgctggcgccggcttcggcaaaatcaggaatgatgcggtcgaccggcttcaccatcaggtgaacgtcgattggcgcggtaataccgtaattacgcagtgacttcagcaccatcgggccaatcgtcaggtttggcacgtagtggttgtccataacgtcgaagtgcacgacatccgcacccgccgccagcgccttcgcggtatcctcacccagacgggcaaaatcagccgacagaatcgaaggggcaatcaaatactgcttcatccgcatctccttgaaatttatttggtcttaggcggacggtagagcgctaatagctcgtccacctttttacgcgtaccaccgttgctgctgatgctgcgccgaaccttcacaatatgcgtttctgccgcgtttttataccattcctgcgtcagcggcgtgcggtggttggaaatcagcaccgggatgcgctttttcatcagcgattccgccttttgcgccagcagtacctgttgttccaggttgaaactgttggtgtggtaggcggtaaagttcgccgtcgccgttagcggcgcatagggcggatcgcaatacaccactgtgcggctatccgcacgttgcatgcactcttcgtaagattcgcagtaaaactcggcgttttgcgccttctcggcgaaatgatagagctcagcttcggggaaatagggctttttataacggccaaacggcacattgaactcgccgcgcagattgtagcggcacaggccattgtagccgtgacggttcaaatacaggaacagcaccgcgcgacgcagcggatcttggctttggttaaattcatcacgatacaggtagtagcgctcagcgacgttattttccggggtaaacatctcacgggcggcggcgacgtattcgtcggtgcgcagtttgacgatgttgtacaggccgattaagtcactgttgatatccgcgaggatataacgagaaaagtcggtattaagaaataccgacccggcgcccacaaagggctcgatcaagcactcgccttccggcaaatgctttttaatatcgtcaagcagggggaactttccccctgcccacttcagaaaagcgcgattctttttcatgctgcctaactaattacacgttctccggctgtggagaaagctccgacagcatcctgcgcttaagactaccccacggcattatttcaggtcagcctgaacctgatgcagcggttttgcccatggatttttcgcctgcacgtccgccggcagcgaggtgacagcacgtttcgcttcatctttcgatgcatagataccgctcaccagcacgtaccatggttggccgttacgcgacgtttcatagacaacatatttatccagcttctctttcttcgcccagttgttgaggttgtcgtagttagaggagctgctgagctgcagagtatagtgacccgacggcgcagttttcattgagctgacgtcacctgccgtcttcccgctcttcgctgccggcgctgccgcagctgccgttgccgctggcgctgcggtcgtcgtggtcggtttgctctgagcggtggccaccggtttgctttcgctgacggacgttttcgccggagcggtggtcgccgtgctttcaacatgcttcggctggaccggcttcgattctaccggcgttttcgccacggcctgtggcttcgactgcggcttcgcttcgataacggtatgcttacgttcagccggacgcggggtcgctgctgtctgacgctcggtcgcctggcgcggcgccgcggtgccattggcgccattccggattggcgcgacggtagccggttcagtcggcagcgtcgagttagccacggcgccgtccagttggccctgctgctgggtcaacgcattgttcagatcgccctgaacttcgatacgctgctggccctgcggcgcaaccgctgcctggccctgcgtcgggttcgcggcaataggcggtaccgttacgtcctgctgtgaggtgctgttagcggcggcagtctggtcctggccggcagcaggcatgctggcggactggtcgtcagacagattaatgctcttctcgccggaagcggtctgctggctggaagatgatggcgatttcagtgcggaaccgatacccacgatcaacagcagcagcaccagaatccccacacccatcatgatgtactggcgggaggccggtttggccggcgcttttttacgcttgcgcggacgacgctctacaggctgctcttcgagcatctcctcgtcttgcgcatccagttcttcttcgaactcttcctcttcacgctcgcgacgggccttaccagcgcgcgtcggacggccttcatcggcatcaagatcaacatcgtcaaaattgatctgcggatcggcatcacgctcggaagactgacgggaacgaccagcacgacgatcgttgcgatcggctttcatatcgtcttctggtttgaaatcatccatttaacaccccactaaaaggcttatgctcacgattattgcacatcacccgaaatgataacgccgcgcgaacgcggccagaccttcttattgttgcgcctgctgagtatcagcaatcgcgccaagaaccacatcgtgcggcactccgccgcgcagctcgctgcttcctattgcgagcgggagcaccagccgcatttcgccagccagtacctttttatcgcgcatcatatggggcaaatacgcctgcgcactcatttcctgcgggccgcgtaccggtaagcctgcacgcttgagcagatcgataatgcgctgagtatcctgcgcgcggaactgccccagccgttcggacgtgcgtgccgccatcaccatacctgccgccaccgcttcgccatgcagccagttaccgtagcccatttccgcttcgatagcatggccgaaggtatgtccaagattgagtaaagcacgtaacccggtttcacgctcgtcggctgccacaacctccgctttcagttcacagcagcggcgaatgcagtacgccatggcggtatcgtccagcgccagcagcgcatcaatgttgttttccagccagctgaagaattcaccatccaggatcaccccgtacttgatgacctcagccagtccggaagcgagctcgcgcttcggcagagttttcagacagttaagatcaactaccacggaaaccggctgccagaaggcgccaatcatgtttttgccgagagggtggttcactgcggttttgccgccgaccgacgagtcgacctgcgacaacagggtggtagggacctggatgaaacgcacgccgcgctgatagcttgccgcggcgaaaccggttaaatcaccgatcacccccccgccaagcgccaccagagtggtgtcgcggccatgtggtttttgcaacagcgcagtaaacacggtatccatcaccgccaggcttttgtattgctcgccgtctggcagaatgacgctgtcaacgttgacccctgactgctccagcacagagcggacggtatccagataaagcggcgccagcgtttcgttggtgaccagcatagcctggtcgcccgacttgagtggcaggaaggaagctggatcgttaaacaaaccagccgcgatggtaatcgggtaactacgttccccgagggtaacagtaagcctctccataacgcgacatccacctcaatgactattactctgacgcacttttattaagccagaatcagttgctttccagcatatgaataatctggttcgcgacgactttcgcactctgatcgtctgtgcggatagtcacatcggcgatctcttcatacagcgggttacgctcgtcagccagcgcttccagcacttcacgaggcggcgcatcgacttgtagcaaaggacgctttttatcgcgctgcgtacgggccaactgcttctcgatcgtagtttccaggtagaccaccacgccgcgggcggagagacggttacgcgtttcacgggattttacagagccgccgccagtcgccagcacaatcccctgtttttccgtcaactcattgataattttctcttcacggtcgcggaagccttcttcgccttcaacatcgaagacccagcccacatcagcgccagtgcgtttctcaatctcttgatcagaatcgtaaaattccatgttgagctgttgggctaactggcgcccaatagtgcttttgccggcacccataggcccaaccagaaagatattgcgtttctctgccattttttcggtactactaagactattcgttaatgataaacccgcttcgcagacacccagcgccgcagggcatgaactgaaacctcatatgcaatagagcgagagtcagactaaaaattatctcaatactccggctggtttggcaactgaataaaatcgccggacaataaagccggacaataaagggaggattgatgtcgtacccgactctcaaatcggtaccccttgtatgctaaatccgtcctcacgtcaaacacctgaaacgtgtttagcatgaaaaacctgcttaacgtactgccagaatccgtggcgtaataaagacaaccagttcgcgacgttcattatctttcccgtcacgacgaaacagacgtcccagtaccgggatatcgccaagcagcgggacgctgtcgcgggcggttttgtttttctgcgaaaagatgccgcccaacgctaaagtctcgccgctgcgaacttccaccagggtctctatctcctgcttatcgatggccagcgcttcgccgttttcctgcttcagcacctggcctggcgtattctcgcttattcgcagcttaagccgcactcttccctgctgcagcaccgtcggcgtgacctccatgcccagcaccgcctctttgaactccaccgaagtggcgccgctttcgccactggaaacctgataggggatctcgcttccctgcttgatgctggcaggctgcatgtgggaggccaataaacgcgggctggcaataatttcgacctgctgcttgcgctccagcgcggatagctccagctcaagcaagcgaccgttgatcttgccgatgttaaaccctgcgcgggtgctggcatcgtttaccgatacatcgctgcttagggtggtgatttgcccggagcctggcgggcttccggcttccgcaagccgccacttcacccccagctcacgaaggctggtttcgctcatcgacacgatatgggcggccagctccacctggccgaccggcagatccatctcctgcgcccaggccttcaacgccggcaggtgccgggcatcatcgcggatcagcagccgattagtccgcttgtccgccatcaggtgtcccctggcgctgagcagctttccgccgcttttagccagctcctcagcgtcggcaaagtgcagggtcacgctctccgcctgcaggggcaggttctgcaggcgtttctcctgttcggcttcacgctgcgcctgatttgccttttgccaggcctgagtgtgcgcgtagatgaccgtcccctgctgttgcaaagagagacccgcgctatccgctaccgcccgcagcgcctggctccagggaaccttctgcagacgcagggagagcgtgccgctgacgtccggcgcgacgacgaggttcttatggttcatttcggccagagcttgcagcacctgggccactggcgcatcgtcaatcaccagcgaaaccggtttatcattgcgggcggcgggggccaccgccagcggcagcagcagaagcagcaggcttatccatcgcatcatgttgtttcccttcacgttgccagcgccacgctggcggttcacatcccgaagacgtgacgatgtccagctcaccggccgtcagccggctcacccgccagcccgtgggcaattgctcatccatgcgtacccgtcgccactttccgttcccatcctgcagaaaccccgtccagccagcatcatccccaaccgccccgccatagcgccattgcgaaagctgcgccgtgcggcagggatcctcaaccggctggaaagggtcacgctcggccgccagcagcgacagcggtagccacaggaagatccagcgtttaccgctcatcttccgcctccagcagcagtcgcaggcggagcgtctgcgcctcacggcccagcgaaaacgaacgcggattcatcccgcagcgcgccagccaggaaaaaagcgcgggtaccgttgaccaggacagggtcagctccatctcgccgccgcttccctgcggacgccaggcgataagcttcgctccggagagcggaatggctatgggcgaaaatgactgcgtgtcgatgcgcgccccgggattttcctcgccggggatgcgcagcgccatgatccgccgccactgcgtttgcaacgccgcatcacgggttaccgccgcctgcggagggcgcagatcgcgccagagcgccacgccgcctcccgacagccccattgcgagcaggatcggcagccccgtccaggtgccccgaaggttaatccgcatcagcgcgcgctcccgtcagggtaaaactgaactgccaacgcccctcggcgtcgcgctgggtcccgccggcttttgccggcgcgaatcccgcgacgcgagtcagcgcagcctccacgctggttaacgcctgcaggttaagggccaggccgtccagcgtgaggagtacgccctggtactccagccgcgtcagccacgcctgcgcgggcagatctgccgccagcgcctgcagcctgggttgccaggcggcgatcgccgatctgcgctggtactgctggcgctgccgttgatgctgctgccacgcctcacgcatcgcctgctcgcgctgcttaagcgaagcgagcagctgcgcgtcggccgtcgtgtgaagcgtcgccaggaagtcgcgctgcagacgcgccgttcggctcaccagcaggcccatcccgcccagcagcacaatgccgatggttaacaacaggacgtagcgcaggcgctggcggcgacgcaggtcgcgccagggaagaagattaacgacatgcgtcatgccgcccgcctcccagcgccagcccaagggcaatggcgtaacgatcgccatcggctggcagcgggggctgccgacggtgaatcacttgccagacatcaaagcgactggcctcatcgcccgcgtcaatacacaggcgcagcggaacctgaagctgccccgccagctggcttaaggacccgacatcagcgcaggcgtcactgccccaggcctcacgggtcgcccacagccagtgcttttcatcccgccacgccaggccctggtctgccgcagtcatccaggggaaaaaggcgccgagcgcactggcatccggtacgatggccgccacccgcagccgcagccgccctgccagctcccgcagaacattgatatccagccgctgcgccgccgtaacctgccagccgtcatcccgcgaggtgggcgcataatcaatacatagcgcggaggcaggcattgccagctgctggctcatggcgctggctacccacgtcgcctgttcccgctcccgcagggcgaactggggatacggaagacgcttttgcagtgtgcgcaccgcgggaaaggcgatactaacctgatgctgcgccggtagctcccgccgccaggcggccagccgcgaaccgagtgcgctgacgtccgccaccattccctgacgtaccagccccggcggcaatgggatacgccaccagcggcgcagcgcccagtgtgaacgttcatgcaatagcgcgacaatggcaatgctatcctgttggatatgcattccaagccgccagtttctgaaagccatgcttacgatctccttatccggcaaaactgcccggctatatcaatgcacctggcttgcctttatactaccgcgcgtttgtttataaactgcccaaataaaactaaatgggaaaacaccggtgaagttcgtaaagtatctattgatccttgcagtctgttgcgtactgctgggagcaggctcgatttttggcctctacaaatacatagagccgcaactccccgacgtcgcaaccctgaaggatgtgcgtttgcagatcccgatgcaggtctatagcgccgacggtgagcttattgcgcagtacggcgaaaagcgccgtatccctgtgacgttgcagcaaattccccccgagctggtgaaagcgtttatcgccaccgaagacagccgcttctatgagcaccacggcgtcgatccggtaggtattttccgcgccgccagcgtggcgatgttttcaggccacgcctcccagggcgccagcaccatcacccagcagttagcgcgtaacttctttctcagccccgagaagacgttgatgcgtaagattaaagaggcctttctggccatccgcatcgagcagttgctgaataaagatgaaatccttgagctgtatctgaacaagatctacctcggctaccgcgcctatggcgtcggcgccgcggcgcaggtctattttggcaaacctatcgaccagctgaccctgagtgagatggcggtgattgccggtctgccgaaagcgccttccacttttaacccgctctattcgatggatcgcgcgaccgcccgtcgcaacgtggtgctgtcgcgtatgctgagcgaaggatacatcacccaggcgcaatacgatgaggcgcgcagcgaacccatcgacgccagctatcacgcgccgaaaatcgccttctccgccccttacctgagtgaaatggtgcgccaggagatggtgaatcgctacggcgagcaggcctacgaagacggttatcgggtctataccaccattacccgcaaaaaccagcaggcggcccagcaggcggtacgcaataacgtgctggattacgatatgcgtcacggctaccgcggcccggccagcgtactgtggaaagtcggtgaaacgccgtgggagacgaagaagatcgtcgattcgctgaagcgtcagtctggctacggtccgcttttcccggcggtggtcacctccgcgaatgcccaggaggctgtcgcgctgttggctaacggcgactccgtttcgctgacgatggagggcgtgcgctgggcccgtcgctttatctctgatacgcagcaaggggcgaccccgcgtaaagtcaacgacgttgtgcaggccgggcagcagatctgggtacgcaaggtgggtgacagctggtggctgtcccagctcccggacgtcaactcagcgctggtctccattaacccgcaaaacggcgcgattattgcccttgtcggcgggtttgactttaaccagagcaaattcaaccgcgccacccaggcgctgcgccaggtcggctccaacattaaaccgttcctctataccgccgcgatggataaaggcttaacgctggcaagtatgctcaacgatgtgccgatctcgcgctgggatgcgggcgcaggttccgactggcggccgaagaactcgccgccgcagtatgccggtccgattcgtttacgccagggcctggggcagtcgaaaaacgtggtgatggtgcgcgctatgcgcgccatgggcgtagactacgccgccgagtatctgcagcgctttggcttcccggcgcagaacattgtccacacggaatcgttggcgctgggctcagcctcctttacgcccctgcaggtcgctcgcggttattcggtgatggccaacggcggcttcctggtcaatcctttctttatcagtaagattgagaacgatcagggcggtgtcctcttcgaggagcgtccgaaaattgcctgtccgcagtgtgatttaccggtaatttacggcgatacgccaaaatccaacgtgctggaaaacaaggatgtggaagatgtcgccacctccgcggaaccgcagaatggcaacgtgccgccgcagccgcagctggagcaggccaaccagtcgctggtcgcgcagagcggcgcacaggaatacgcgccgcatgtgattaacacaccgctggccttcctgatcaagagcgcgctgaacagcaacatctttggcgagccgggctggatgggcaccggctggcgcgccggacgcgatctgcagcggcatgacatcggtgggaaaaccgggaccaccaacagctcgaaggacgcctggttctcaggctacggaccgggcgtggtgacctcggtttggatcggctttgacgatcatcgtcgcgatcttggccggaccaccgcctccggagcgattaaagatcagatctctggctatgaaggcggtgccaaaagcgcccagccggcctgggacagctttatgaagagcgtgctggaaggcgttccggaagaaccgttaactccgccgccgggtatcgtcacggtgaatatcgaccgcagcaccggtcagttggcgaacgggggcaatagccgggcggagtactttattgaaggaacccagcccacccagcaggcagtccgtgaggtgggcaccaccctgactgacggtggcggtgaaacccacgaattgttctgacaaaaaaagcgcctgcgggcgcttttttattgctgcttagcgtgaacgctcgttcagagtcggccctgggcctgcagccattcccgcactaaaaacagcgcgctgacgttacgggcctcgttaaaatcttcttcatccagcagcgacatcagctgcgccagcggccagcgcacctgcggtagcggctcaggttcatcgcccggcagtgactccggatagagatcttccgccaccatgatattcattttgctggagaagtaggagggggccatactgagcttcttcaaaaacgtcagcttattggcgccatagccaacctcttctttcagctcgcgattggccgcttcatccacggtttcacctggatcaatcagccctttggagaagcccagctcgtaggactccgtccccacggcatactcacgaatcaaaataatgtgatcatccacaatcggcacaatcatcaccgcttcacgggtggaaggccgcatacgttcataaacgcgacgcacaccgttgctgaactccagatcgacgctttcgacattaaagaggcgcgaacgggcgacagtttcaacattgagaatggtgggtttttgtaatgatttgctcattgtcatcggtctatgctgtgattaagcagtcattgtgcgatacgcaacacgctttcggcaatccaaattgctacttatttacagagttgtaaccttttccctgcagggggaaaagtaataaagataaaaaagtcaatagcttgaattcgctttgagaatttaccgatttctgcgctttaacgtttttggtaagcttgtgcgctgctgcatgacatattcactaccctgtaagcaggtgcgccgctaacactgcagcttgacgttagtcttcacgttcaccgacgatttcgtaagaaaaaaataactttgatgggatgggcatgggcacctttctgatattccttacagctctgctaatctgcgtattgctcatcggatggtggtatcgcgctcacgccagacgccgccgactccccctactgcacgcctttagcgacgctaccacgcggcagcttcctgcggatgagcgccaggctattgagaagtatgttgccgagttgagccacgcccagcaggtgccggcgtccggtgcgaccagcgcgcctgtcgctctggcgctgaacgaacagagtgataccgtctatgcggtgacacgcgccatcacccgctacgggatcaccaccgacgcgccgaataaatggcgctatttcctcgattcggttgaagttcatctgccgccgttctgggaacagcatatcaacgatgaaaacagcgtcgagctgatccccaccgacagcctgccgctggttatcacccttaacggtcatagcctgagcgactatcgccaggaagcgcaaagctacgccctggaacgcgcttcggccacccaggcctccattcgcggcgaagagagcgagcaggtagagttgcggcagatccgtcgggaaacgcctgaagaacacgctctgaatcgcccggacgggctgcgcgaagcgatcctgatcgtcgcctcctttctgttcttttatttcagcctgattgggccagctgtctttaccccctggctggtcgccgcaggtttgttgctgctcgccgccggactgtgggggatttatgccccgccgcgtcgcgccgcgctgcgcgaaatccattgcctgcggggcgtccctaagcgctggggattgtttggcgaaaacgatcaggagcagatcaataacatctcgctgggcattatcgatctcatctatccgcgccactggcaaccctggattgcccaggacctggggcagcagaccgatattgatatctatctcaaccgccacgtggcccgtcagggacgctacctgtcgcttcatgatgaagtgaaaaacttcccgctgcagtactggctacgcagcgcgattatcgccgccggcgccctggtggtggtgattatgctgtgggccagcgtaccgttgaatatgccgtttaagttcaccctgtcgtggctgaagggcgcgcaaacgattgaagccactaccgtcagccagctggaaaaagcccatgtgcgcattggcgatacgctgcgcctgaccggtaccgggatgtgtaacatccgcacgccgggcagttggtccgccaaagaggattcgccgttcctgcctttcgattgttcacagattgtgtggaacgacgcccctcctctgccgctgccggagtctgacattgtcagcaaagcgaccgccctgatgcagtccgtccagcgccagctgcacccggaaaccgacgatgattcccgcgtcagccctgccctacgctccgccattcagaaatcaggcatggtgctactggatgatttcggcgatatcgtgcagaaaactaacgatctctgctcggcaaaggatgattgcctgcggctgaagaatgcgttggtcaatcttggcaatacccgtaactgggaaacgttaaccaagcgcgccaccgccggcaagctggatggcgtgaacgtgctgctgcggccggtcagcgccgagtcgctggagaatctggtgaccacctcaaccgcgccctttgtgatacgcgaaacctcgcgggccgcgcaggcgctgaacagcccggctcccggcggttttcttatcgccagcgatgagggcagcgtactggtcaatcagccgtggccggcggtgagtctgtatgattatccggcccatgagcagtggggcgaactgcggcggctggccggtatgctcatgcatacccccttccatgccgaaggtatcgtgaccaacctgtttactgacgccaacggcacgcagcatatcaacctgcatcgcatccccgaccgcagcggcctgtggcgttatctgggcatcaccctgctgctgctttcaatggtggggtgcatggcttaccacgccgtgcaggccctgcgtcgttatcaacgccatcgtcagcgtatggaagagattcagaaatattacgaaagctgccttaatccggttttgctcccctcatctgactcgcaagattaattttcccggcgacagggtgtgataccctgtcgcccattttccgctcgctggagagtcatcatgcactttgatatcgcctggcaggaggtcgataccgttctgctggatatggacggcacgctcctggacctcgccttcgacaactacttctggcaaacgctggtgcctgaaacctggggggccgcccgcggcctcaatttgcaggaggcgaaagacgccatgcgccaggagtatcacgccgtgcagcatacgctaaactggtactgtctggattactggagcgagcgcctgggtttggatatttgtgcgatgaccagcgaacaaggtccgcgcgccacactgcgcgaggataccgtgccgttccttgatgcgctcaaggcctgcggtaagcgacgcattctgttgaccaatgcccatccccacaatctggcggtgaagctcaaacacaccggcctggacgcgcaccttgatttattactttccacccacacatttggttatccgaaagaggatcagcgtctgtggcgcgccgtggcggaggaaactggccttgaggcgcacaaaacgctgtttgtcgacgacagcgaggcgatactggatgccgcgaaggagtttggcattcgttactgcctgggtattaccaatcctgactccggactggcggaaaagcagtatctgcgccatccggggctgaatgattaccgacgactgatcccttcgcttaccccgaaggagaggcgatgaaagagaagcccaccgaaaccgtcagactggacaaatggctttgggccgcccgcttttacaaaacccgcgcgctggcgcgggaaatgattgaaggcggcaaggtgcattacaacggacaacgtagcaaacccggaaaaatcgtcgaactcgacgccatgctgacgctgcgccagggcaacgacgagcggacggtgcgcattatcggcattaccgaacagcgccgcccggcaagcgaagccgtcaacctgtatgaagagacggcggagagtatcgagaagcgtgaaaaaatggccctggcgcgcaaaatgaacgccctgaccatgccgcaccctgacagacgtccggacaagaaagagcgccgcgacctgatgagatttaaacacggcgagagtgaataactcgcgccagaaagagagatgattatgactcaacacgatcaattacatcgttatctgtttgaaaactatgccgtgcgcggcgagctggtgacggtgtcggaaaccctggaacagattctggcgaatcacacctatccccaaccggtcaaaacggtgctggcggagctgttggtcgccaccagtctgctgaccgcgacgctgaagtttgccggcgacattaccgtacagctgcagggggatggccctttacagctggcggtgatcaacggcaataaccagcagcagctgcgcggcgtcgcgcgcgtgcagggcgagattgcggacgatgcggatctgaaaacgatggtcggcaacggctacctggtcattaccatctctccggaagaaggtgagcgctatcagggcgtggtcggtctggaaggcgatacgctggccgcctgcctggaagattatttccagcgttcagagcagctgccgacgcgccttatcatccgcaccggcgatcatgaaggccagccgatggcgggcgggatgctgctgcaggtgatgccggcgcaggatgcccagactgccgacttcgagcacctggcgacgcttaccgagaccattaaggcggaagagctgttcaccctgccggcaaatgatgtgctgtggcgcctgtatcatgaagaagaagtcacggtctacgacccgcagagcgtggagttcaagtgcacctgctcccgcgaacgctgcgccggcgcgctgaagacgctgccggatgaagagattgatagcatcctcgccgacgaaggcgaaattgatatgcactgcgactactgcggtaaccactatatcttcaatgccatggacatcgccgagatccgtaataacgcctctccggccgatccgcaggttcattaatccccgcatctttctcaggcacagggcggcaatgttgtttgtcgcgttgtgcctgacttttaatttattcgcgagttgaatcgattttccctgaaagagttacgtaatttaatttcaggaaagcgattacattcacatttcggcagtttttttaattactttttaaccattgagaaacatctaaccccaccatccgcccatttcctgagataatccactccacttcgtgacaggagtcaccgtttttatcgtcattctgaggaatgtcgagatacgtaaatctatgagcctggtcgcggtcaatacccggcaattaaccctacaatttacagcagtacatcttggctaaggagcagtgacatgcgcgttaatcatggtttaaccccgcaggatctcaaggcttatggtatcaatgacgtccaggatatcgtccacaaccccagctacgacatgttgtttcaggaagagctcgacccgaacctggaaggctacgaacgtggcgtattaaccactctgggtgctatcgccgtcgacacgggcatttttaccggtcgttctccgaaagataagtatctcgtgcgcgacgacaccacccgcgacaccgtctggtggtccgataaaggcaaaggtaaaaacgacaacaagccgctttcgcaggaaacctggcagcatctgaaagggctggtgacccagcaactgtccggtaaacgcctgtttgtcgtcgacgctttctgcggcgccaacgccgatacccgtctcagcgtacgtttcattaccgaagtggcctggcaggcgcacttcgttaaaaacatgttcatccgtccgagcgatgaagagctggctgaattcgtgcccgacttcatcgtgatgaacggcgcgaaatgcaccaatccgcagtggaaagagcagggcctcaattcggaaaacttcgtcgccttcaacctcaccgagcgcattcagctgatcggcggcacctggtacggcggcgagatgaagaaagggatgttctcgatcatgaactacctgctgccgctgaagggcatcgcctccatgcactgctcagccaacgtcggcgagaaaggcgatgtcgccattttcttcggcctctcaggcaccggcaaaaccaccctctccaccgacccgaaacgccgcctgattggcgatgacgaacatggctgggatgacgacggcgtgtttaacttcgaagggggctgctacgccaagaccatcaagctctctgaagcggccgagccagatatctatcacgccatccgccgcaacgccctgctggaaaacgtggtggtacgcgccgacggcacggtcgatttcgatgacggttcaaagaccgaaaatacccgcgtctcctaccccatcgaccacatcgacaacattgttaagccggtgtcaaaagcgggtcacgccaccaaagtgatcttcctgacggccgatgcgttcggcgtcctgccgccggtctcccgcctgaccgccgaccagacgcagtaccatttcctgtccgggtttaccgccaaactggccggcaccgagcgcggcgtaaccgaacccacgccaaccttctccgcctgcttcggcgccgccttcctgtcgctgcacccgacgcagtacgccgaagtgctggtcaaacgcatgcaggcggctggcgcgcaggcttatctggtcaataccggctggaacggcaccggcaagcgcatctcgattaaagatacccgcgcgatcatcgacgccatcctcaatggctcgctggacaacgcggagacctttaccctgccgatgtttaacctgcagatcccgacggcgctcccgggcgtggatacccacatcctcgatccgcgcagcacctatggttccccggagcagtggcaggaaaaagccgaccagctggcgaagctgtttattgagaattttgagaagtataccgatacgccagcgggcgccgcgctggtggcggcaggaccgcagcgctaacgggcgcaaaggtgaaaaagccgggcttgcccggctttttattgtgcaacatcctgagcagctaaccgcgggcgcgatcagctctccctggcgggtttcatcggcgccagcatccggtgcaccggcagccaggcgcggatcagtaacccgccgcgttcgctggagccaatctccagccggccgttgtgattgtcgataatacgctgaacaatcgccaaccccagcccggtgccgctggtgctgcgggcgctgtcgccgcgtacaaacggctgaaacaggtgctcccgctgctcaggtttaatccccggtccatcatcttctacctggaaccaggcccggctcgcttcgctgccgctgctgaccttgatccagccattgccatagcgggccgcgttgaccaccatattcgccagcgcgcgcttgatagacagcgggtgcatacgtaccggaatctcgccggcctgcagggcggtggcgatttcccgctcatagccgctctccgcagcgatcacttcccccagcaccgcattcagatccgccagctccatcggcatctcctgcccggtgcgcagatagtcgataaactgctcgatgatggcgttgcactcttcgatatctttgttgatcgactccgcgagatagccgtcctgctcgcccatcatctcggtggccagacgaatgcgggtcagcggggttcgtaaatcatgactgaccccggccatcagcagcgtacggtcatcagccaactgcttcacgcccgccgccatatggttaaaggcgcgcgtcaccgaacgcacttcggaggcgccatactcgcgcagcggcggcggaataatgccgcgcccgacctgcagcgccgcgtgctccagatccaccaacgggcggttctgaatacgaataaacagccaggcgccgcctatcgccagcagcatgatcgccagggtatagcggaacagcggcgagaagtcgccctgatggatctcggtcagcggcacccgcacccagatattgggcgacagccaggtcttcagccacaccacaggggagcttttattgacctctacccgcacctctgtggggccaccaagctgatgggccatctgctgacttaagaattcataatgctgcgcccagcgcaggcctgcgtcttccgccgcttcattggaatagagcgaaatccccagctcgcgataaatttcacgacgaaacgccgggggcaccaccagctgggtgccatcctccagctgcagtttgtcggtcatcagcatacgcacttcgtaggctaacactttattaaactgctggagactcggcaggatcgcgaaattcagtaccaccagataggtcgtcaccaggctgacgaacagcaaagtgacgatcaggagcagtgtgcgagcaaaggagctgcgcggcgaaaagcgcacgcgtttcatgccttagaaccgtccgggacgaagacgtagcccagaccccagacggtctggatgtagcgcggatgcgccgggtcctcttccaccatgcggcgcaggcgggagatctgtacgtcgatggagcgctccatcgcagagtattcgcggccgcgggcgaggttcatcagcttatcgcgcgacagcggctcacggggatggctcaccagcgccttcaggaccgcgaattcgccgctggtcaacggcatcggctcgtcttcacggaacatctcgcgggtacccaggttcagtttgaatttaccaaaggcgataaccgcctcttcctgcgacggcgcgcccggcagctcgttcgcctggcggcgcagcaccgcccggatgcgggccagcagttcgcgcgggttaaacggcttcggaatatagtcgtcagccccgatctccagacccacgatccgatcgacctcttcgcctttcgccgtcaccataatgatcggcatcgggttactctggctgcgcagacgacggcagatagagagaccatcttcgcccggcagcatcagatccagcaccatcaggtggaaggattcacgggttaacagacgatccatctgttcggcgttcgccacgctacgaacctggaagccctgctcggtcagataacgctcgagcagcgcacgcaggcgcatgtcgtcatccacaaccagaatcttataattctcttgcattgtttgtactcccaaaggttcactgcaatagtcagtgcgtattctcaaaaaagcccggcgcgctcaccagctaaatctggtatatattccaggctaaattgttacaaagcatatttaacagcaggttaagtatacatttaatcataagacacagtatttatcctgtcggtattattacgcgctacaaattgtgcgcaacgacagacagtcagaaggttgaactcacgatgaaaacgccgctgatcacccgcgagggatatgaaaaactgaagcaggagatggactacctgtggcgccaggagcgtccggaagtgaccaaaaaggtgacctgggccgccagcctcggcgaccgcagcgagaacgcggactaccagtacaacaaaaagcgcctgcgggagatcgatcgccgggtccgctatctgaccaaatgtctggaacagttgaaaatcgtcgattactcgccgcaacaggaaggtaaagtcttcttcggcgcctgggtagagattgaaaacgatgaaggcgatatcaagcgctttcgcatcgtcggttacgatgaaatttttggccgcaaagactatatctccatcgactcgccgatggcgcgcgcactgttaaaaaaagaggttggcgatctggccatcgtcaacacgccggcgggcgaagccagctggtatgtcaacgagatcgaatacgttaaatagacaagaactttccgagagacgcccggcgcggctggtatttttagccgtcagtccgtataactagtccctgttttttgaccctaaagatgaattaaaagccatgatgaatgattcgctctgccgcattattgcgggtgaacttcaggccagagccgaacaggtagaagctgccgttcgcctgcttgatgaagggaacaccgtgccgtttattgcacgttatcgtaaagaagtcaccggcggtctggatgacacgcagctgcgtaatctggaaactcgcctcggctatctgcgcgaactcgaagaccgtcgtcaggcgatcctcaaatccatcgctgaacagggcaaactgaccgacgcgctggaaaaagccatcaacaccacgctcagcaaaaccgaactggaagatctctacctgccgtacaagccgaagcgccgtacacgcgggcagatcgctatcgaagccgggctcgaaccgctggctgacctgctgtggaacgaaccggcccacgatccggaagcggaggccgcaaaatatattgatgccgataagggcgtagccgacagcaaagcggccctggacggcgcgcgctatattctgatggagcggtttgccgaagacgccgcgctgctggcgaaggtccgtgactatctgtggaaaaacgcccacctggtctccaccgtcgtcagcggtaaagaagaggaaggcgccaaattccgcgactacttcgatcaccatgaaccgatcgccaccgtgccgtcgcatcgcgcgctggcgatgttccgcggtcgcaacgaaggcgtcctgcagctctctttaaacgctgacccgcagtttgacgagccgccgaaagagagccacggcgagcaaattattatcgaccacctgggcctgcgcctgaataacgccccggcggacagctggcgtaaaggcgtcgtcagctggacctggcggatcaaagtcctgatgcatctcgaaaccgagctgatgggcaccgtgcgcgaacgcgcggaggacgaggcaatcaacgtcttcgcccgcaacctgcacgatctgctgatggccgcgcccgccgggctgcgcgccaccatgggactcgatccgggcctgcgcaccggggtgaaagtggccgtcgtcgacgccaccggtaaactggtcgctaccgataccatctatccccacaccggccaggccgccaaagcggccgtcgccgtcgccgcgctgtgtgagaagtacaacgttgagctggtggccatcggcaacggtaccgcctcgcgtgaaaccgagcgtttcttcctcgacgtgcagaagcagttcccgaaggtcaccgcccagaaggtgatcgtcagcgaagccggggcttccgtttactccgcctccgagctggcggcgcaggagtttccggacctcgacgtgtcgctgcgcggcgcggtctccatcgcccgccgtctgcaggatcccctggccgagctggtgaaaatcgacccgaaatccattggcgtcggccagtatcagcacgacgtcagccagacccagctggcgcgtaagctggacgcggtggtggaagactgtgtgaacgccgtcggcgttgacctgaacaccgcctccgttccgctgctgacccgcgtcgccggcctgacccgcatgatggcgcagaacatcgtcgcctggcgcgacgagaatggtcagttccagaaccgccagcagctgctgaaagtcagccgtctggggccgaaagcctttgaacagtgcgcgggcttcctgcgtatcaaccacggcgacaacccgctggatgcctccaccgttcacccggaagcttacccggtggtcgaacgtattctggccgccacccagcaggcgctaaaagatctgatgggcaatagcagtgcgctgcgccacctgaaggcagtggacttcaccgatgagaagtttggcgtcccgacggtcaccgacattatcaaagagctggaaaaaccgggccgcgatccgcgtccggagtttaagaccgcgaagttcgccgatggtgtggagaccatgaatgacctgctgccgggaatgattctggaaggtgccgtcaccaacgtcaccaacttcggcgcgtttgttgatatcggcgttcatcaggacggactggtacacatttcgtcgctttctgaccggtttgttgaggatccgcacaccgtggtgaaagcgggcgacatcgtcaaggtcaaagtgatggaagttgatctgccgcgtaagcgtatcgccctgaccatgcgtctcgacgagcagccgggcgacagcaacgcccgccgcggcggtggtcaggagcgcccgcagggaaatcgcccggctgcgaaagccgccaaaccccgcggtcgcgaggcgcagcctgccggcaacagcgcgatgatggatgccctcgccgcagcgatgggtaaaaaacgctaaactctccctgcccctttttcaggggcagttttttttcatgaccaggccatcgccatcacgcgcaaaacagcttcagttgtttctgataacctgcttttattccacgcctgaaaggcagcgaaattaatattttcatttcgttaacttcagaaaccttaattaaacattagatcgccgaaataatatttcgcgcatttttgattacaggctgactttgcggcatatcaataaaaaggtgattttcactttaaaaatagcctgcagcgcatcatatgtattgatgataaaaaccattctcattatcatcgattacagaacgttttttcttttttcgttggctacggtccccggcgcaactgcctccaggcgtccggaaaattcttcttcggttagcgatagacaagtaggccctatgcaattcacacctgatagtgcgtggaaaattaccggtttttctcgcgatattagcccagcataccgtcagaaactgctctccctcggcatgctgcccggttcctcttttcatgtggttcgcgtggcgccgctcggcgatcctgttcatattgaaacccgacgcgtcagtctggtattacgcaaaaaagatctcgccttaatcgaactggaagcggttgcacaataacggctggcccggcacaagagtctgaaatatgcaaaaattaaccgttggtttaattggtaatcctaattccggcaagaccaccttatttaatcagctgaccggcgctcgccagcgcgtgggcaactgggctggggtgaccgttgagcgtaaagaggggattttcgccaccactgaccaccaggtcacgctggtcgacctcccgggaacctactccctgaccaccatctcctcgcagacctcgctggacgagcagattgcctgccactacatcctgagcggcgacgccgacatgctgattaacgtggtcgatgcctccaacctcgagcgcaacctctatctgacgctgcagctgctcgagctggggatcccctgcgtcgtcgcgctgaacatgctggatatcgccgaaaagcagaaggtgcggatcgatatcgacgccctcgccgcccgtctcggttgcccggtcattccgctggtatcgactcgcggacgggggatcgaagcgctgaagatcgccctcgaccgtcatcaggcgaacagcgatcttgagctggtccactatccgcagccgctgctgcgcgaagctgacctgctggcgcagcagatgtcagcgcagatcccgccccggcagcggcgctggctgggtctgcagatgctggagggcgatatctacagccgggcctatgccggcgacgccgccgataaactggatatcgccctggcgaatctcagcgacgagatcgacgacccggcgctgcacatcgctgacgcgcgctatcagaccatcgccgccatttgcgacgccgtcagcaataccctgaccgccgaaccaagccgcttcaccgccgcgatggacaaagtgatcctcaaccgcttcctcgggttgccgatttttctctttgtcatgtacttgatgttcctgctggcgatcaacatcggcggcgcgctgcagccgattttcgatgccggctcagtcgcgatctttgtgcatggcattcaatggctgggttacaccctgcacttcccggactggctgaccgtgttcctcgcccaggggatcggcggcggtatcaacaccgtgctgccgctggtgccgcagatcggcatgatgtatctgtttctctccttccttgaggactccggctacatggcgcgcgccgcctttgtgatggatcgcctgatgcaagccctcggcctgccggggaaatccttcgtcccgctgattgtcggttttggctgcaacgtgccgtcggtgatgggcgcccgcacccttgacgcgccgcgcgagcgtctgatgaccattatgatggcgccgtttatgtcctgcggcgcgcggctggcgatcttcgccgtcttcgcggccgccttctttgggcagaacggcgcgctggcggtcttctcgctctatgtgctgggcattgtgatggccatcctcaccggcctgatgttgaagcacaccattatgcgcggcgaagcctcgccgttcgtgatggagctgccggtgtaccacgtcccgcatatcaagagcctgattatccagacctggcagcgcctgaaaggctttgtgctgcgcgccgggaaggtgatcgtcatcgtcagcatcttcctcagcgcgctgaacagcttctcactgagcggtaaggtcgtcgacaacatcaacgactccgcgctggcctcggtgagccgggtcattacgccggtgtttaaaccgatcggcgtgcatgaagataactggcaggccaccgtcggcctgtttaccggcgcgatggcgaaagaggtggtagtgggtacgctgaacaccctctataccgccgaagatatccagaatgaggaattcaatccgcagaccttcagtctcggcgaagaactgctcgctgccgtcgatgagacatggcagggactgaaagacaccttcagcctcagcgtcctggccaaccccatcgaagccagcaaaggcgatggcgaaatggccaccggcgccatgggggtgatgggcagtaaatttggcagcgcagcggcggcatacagctacctgatcttcgtcctgctctatattccctgcatctcggtgatgggcgccatcgcccgcgaatcaagccgcggctggatgaccttctccatcctgtgggggctgaatatcgcctattcgctctcgacgctctattaccagaccgttagctttagcgatcacccgcgctacagtctggtatgtatcctggcggtagtgttgttcaacgtggtgctcttcggcctgttgcgccgggcgcgcagccgggtggacgtctcgctgctggccacgcgaaaaacgccggcctcctgctgttccagcccggctggcgattgccactaaggagggactgtggcgtcgttaatggaagtccgcgatatgctggccctgcagggccgcatggaggcgaaacagctcagtgctcgcctgcagacacctcagccgctgattgacgccatgcttgagcgaatggaagccatgggtaaggtggtccggatcagcgaaacgagcgagggctgcctctccggcagctgtaaaagttgccctgaagggaaagcggcgtgccggcaggagtggtgggcgctgcgatgaaaggagtcaggccaggtcgcgcaacgaggtaaaacgagtaagacagctatgaaaaacgggccagcaggcccgttttcttatgactggattatttataaacgtcagcgttcgcgtgtacggttttttcgtttttctgcccggcaatcaccacaaagtatttcccacccagctcatcggcttttttcgacagatcgcggcgggcgtccatcggcgatgtcgtcctggaggtcgtaatgctaccgaccttggtcagattcatcttcgccacgtcttctttttggatctctttcgcggcgaatgcgccgaaagagagggtgcctatcaccagagatgcaaccattcctgtaacaagtttcatagcctctactctccataaggttgttattgtaggtcacggtggcggattgaaataatcaaccaccgtaacaacctaagtattgctaggaatggcccttttaccatggcgcggcaaaaaaaattaccccagccgcgtcttcagcgccagcagcggctcgcagaaggccgcgggatgggaaacaaacggcgcatgcgcggccttatcgaagaggattgactcgctttccggccacaggtcatccagcaacgggacgatcttgcgcggcaccagtccatccagccggccatacagccgcagaaacggcatcggcagcctgaccagcgcctgacgcagatcgacggttctgaggatctccagtccgccattcagcgcctcggcggaaggcatcggcagcgagagcaccgcctgctttaacgcccgcgcatcctgacgcgcgctctctgtgcccatggtttgcagggcgaggaatcgctcgacggtgcgctggaaatcgtcgctcagctgctgctgaaatccggccagcacctcgggcttgatgccgggccagtcgtcacgagccgcgaaacagggggaagaggcaaccgtcaccagcgcctgcacgcgttccggacgcataatcgcgacctggctggccaccagcccgcccaggctccagcccagccacaccgcctgtggaggggcctgctccagcacccgctgcgccatcgcctccagcgacatcgccccaaacccgccgctgcggccatagcccggcagatccaccaggtggagggtaaaatgcgaagccagctgcggcgtgatgcaatcccatacctgagcgttcagcccccagccgtgcagcagcacaagatgacaatctccttcgccgattgtttgccaccagatgtcgttcatccgttaccgttctctttttactggacagaaggccaaatatgctaacagcacacagcttatgctggctatgccaaatgccgctggcagtcgcccgctgggggatctgctcccgctgcagccgcgccctgctcgcctgtcccccgctctgcccgcagtgcggcctgccggcggcggcatcccgtcacccctgcggccgctgcctgcaaaagccgcctccctggcatcggctggtggcggtcaatgactatcgcccgccgctgagcggtctggtgcagcagctgaagtttcaccatcgcccggagctgggggccgccctcgcgcgtctgctgctgcagcgccttctgcagcgtgacgatttgccgccagtagacgctctggtcggcgtgccgctatggcatcgccgtcgctggcgccggggttataatcagtgcgacgaactgtgccgaccgttagcccgctggcgaggatgcgtctggcatcgcgaaggcctgactcgccagcgagccggcgccgtccaacattcgctcaatgcccgccagcgcaggcagaacctgaaaaatgcctttcagcttgaatttgccgtgcagggactccatatcgctctggtggatgatgtcgtcacgaccggcagcaccgtcgccgagatatcccgcctgcttttgcgaaacggcgccgcgacggttcaggtatggtgtttgtgccgtaccttgtagacccccgctgatgggcgtattataacccagtaaaatagtcaactattaggccaacgctatgatccgtatttccgatgctgcacaagcgcactttgccaaactgctggcaaatcaggaagaagggacgcaaattcgcgtatttgtgattaatcccggcaccccaaacgctgagtgcggcgtatcctactgcccaccggatgcggtggaagacaccgacacggcgctgaaatttgaacagctgaccgcctatgtcgatgagctcagcgcgccctatctggaagacgctgaaattgatttcgtcactgaccagctcggctcgcagctgacgctgaaagcgccgaacgccaaaatgcgcaaagtctctgacgatgccccgctgatggagcgcgtcgagtacctgctgcagtcgcagattaacccgcagctggcaggccacggcggccgcgtatcgctgatggagatcaccgacgacggtctggctatcctgcagttcggcggcggatgcaacggctgctcgatggtcgacgtgaccctgaaagaaggtattgaaaaacagctgctgaacgagtttccggagctgaaaggggttcgcgatctgaccgagcaccagcgcggcgagcactcctactactaaacccttcctccggcggcagcctgccgccggatcgccgtgatccattctgtgttaccgcgcaacatctcccgctaaatgaccggcaaaaaccggggaaagagtatgacttaagtctcatatttaacattttcccccgtcaggtgattctcaaccctcacatgttacccgtatcatccatttcaggcgccaccggcaaaaaaatagccagctatcctttctctgggtaaggataatgcaagcgtttacggtgccagactattttgctccctgacggagcggatgctctacaggttcgaactttgacgttacccataacaaattaaggccaggtaaatcatgccattagtcatcgttgctatcggggttgccctgttgttgctgttaatgatccgtttcaaaatgaacggcttcattgcgctggttctggtggcgctcgccgtcggattaatgcagggtatgccactggataaagtgatcgtctccatcaaaaacggcgttggcggcacccttggcagcctcgcgctgatcatgggcttcggcgctatgctcggtaagctgctggcagactgcggcggcgcccagcgtatcgccaccacgcttatcaataagttcggtaagaagcatattcagtgggcggtggtcctgaccggcttcaccgttggcttcgccctgttctatgaagtgggcttcgtgctgatgctgccgctggtgttcaccatcgccgcctcggcccgtattccgttgctgtacgtcggcgtaccgatggcagccgcgctctccgtcacccacggcttcctgccgccgcatccgggtccgaccgcgatcgccaccatcttccatgccgatatgggcaaaacgctgctctacggcaccattctggctatcccgacggttatcctggcgggaccggtgtttgcgcgcttcctgaaagggatagataagccgatcccggaaggcctgcataacccgaaagtgttcactgaagaagagatgccaggctttggcgtcagcgtctggacctcgctggttccggtgatcctgatggcgatgcgcgccgtggctgagatgatcctgccgaaaggccacgccttcctgccaattgccgagttcttcggcgacccggtgatggccaccctgattgcggtactgattgccctgttcaccttcggtttgaaccgcggccgctccatggagcagatcaacgataccctgacctcttcgattaaaatcatcgccatgatgctgttgatcatcggcggcggcggcgccttcaagcaggtgctggtggatagcggcatggataaatacatcgcctctatcatgcacgaatcgaacatgtctccgctgtttatggcgtggtctatcgccgcggtgctgcgtatcgcgctgggttcggcgaccgtggccgccatcaccgcgggcgggatcgccgcgccgctgatcgccaccaccggcgtcagcccggagctgatggttatcgccgttggctccggcagcgttatcttctcccatgttaacgatccgggcttctggctgttcaaagagtactttaacctgaccatcggcgagaccatcaagtcctggtcggtgctggaaaccattatctcagtctgcggcctggtgggctgtctgctgctggggatggtggtgtaaggtcactcccgccacagaaaaaggccggtccgcgtgaagcgggccggccttttttatcggacatgctcttcgccgcgcagaggagcgcgcggcaggaagttatcaggaggcggctttcttgctcgccgccttgcgccgtttatccagatccttaatcagcttattgacccgttcatcggcaaacatctgctccagggtgacggacagcttccggcgccagttcgggtactcggtgctggtgcccggaatgttaaccggcgtcgccatctccagccagtcttccggctgcaggcccagcagggcgctgttgctgtcggcaatataacgctgcatcccccggttgaggatccccgtcatgctcatcagcgaggccttatggccggcgcgcttgggcagacagccgtacttatgcagcgcgtccagcagcccttgcttcgccagctcgcggtcctggtacagtccgcgcagcaccacctcatcaggatagaggcccagcgctttacctaacgtcagatcgccgctttcccagtagccgcgaagagtgggcaggtcgtgcgtcgtcgccacagccattgattgctccgggtacagcgccggcgcgcggaacgttttctctgcatcactctcaaaatagagcaccttataagaatagacgccgctgttgcgtaacttgctgacgatctccaccggtaccgtgcccagatcttcaccgatcaccatgcagcgatgacgctggctttccagcgccagaagcgacagcagatcgtcgaccggatactgaacgtaagcgccatggtcggcggtttcaccatacgggatccaccacagacgcagcacagacatcacgtgatcgatgcgcaacgcgccgcagttctgcatattagcgcgcagcaggtcgataaacggctcataggcgcgggcggcaatgatatgcggatccatcggcggcaggccccagttctggcccagcgggcccagaatatccggcggcgcgcctacggatgctttcaggcagtacagttcacgatcgcaccaggtttccgacccgccctcggcgacgcccaccgccaggtcgcggtagaggccgatcggcatgccgtcacgctggctggtttcccagcaggcggcaaactgactccaggccagccactgcagccaaagatagaaactgacgtcatcctcatgctcgacgcagaaggctttcacctccgggctgtcgatatcctgaaaggccttcggccaggccggccagccccagcgcagcgggtcctgttgtacctgccaggcgtgcagcgcatcgaaagccgcctgccagtagaggctttccccttcgcgcagaacaaactcgcggaacgctgccatctgctcatcttcacgacgagagaattgtttccacgccatacgcagcgcggtcattttcagcgtagtgacggcggtataatccacgtcgtccgtttcccgcgccgcctgcagtgcctgctgcgttgccggagactgccaccacgcctgcgcctcttcgctacgctggaaatcttcaaccgcgttgacgtcgatataaataacgttcagccagcgacgtgaagacgggctataggggctggcgctctccgggttcgccggatagagggcatgaatcgggttaaggccaataaacgacccgccgcggcgggcgatttccggcagcatggcccgcagatcgccaaaatcgccgatcccccagtttttctcggagcgcagggtatacagctgcacgcaggtgccccacagctttttcccctctttcagcggctgcggctcatagcagcgggctggcgcgacgatagtccggcagtgccagcgctccccctcctgggtgagggtcagggagtggtacccctccggcagtttggccggcagcggcagcgtctcgccgccgcgggttttcccttgatactgcttaccatcctcagtagtcaggatccactgatactcaccgcgtcctgccaccggcagcgacatttttttgccgtgagtgaaaattttcacgttcggcagcgggttaaccgccactttcgtggcggcggtagagcgatgcatcgcatccagcaggcgctgtttggtgacagccgcgatagactgcggcttgccgtgcgcgttgatatagctggggctgatgcccgccgccagcgcggcattatcgaggcgtttactctccataggccttcctttagcgtttcgcctgccagatacgttgctgataatcgcggatcgagcggtcggagctgaacatgccgcagcgcgcggtgttgaggatagccgcgcgggtccaggcctcctcgtcgcgatacagctcatctacccgtttttgcgccgctacgtaggcttcgaaatcggccagcaccaggtacggatcgccgccctgcagcaggctgtgcagcatctgatcgaaggcatgcttgtcgccgttgctgtaggtgccgttctccagctccttaagcaccgcatcgagcaacttgtcttttttacgccatttcagcggatcgtagcctttcgctttcagggctttcacctcttcaaccgtgtggccgaagataaagatgttctcctcgcccacctgctcagcgatttccacgttagcgccatccagcgtcccgacggtcagcgcgccgttcagcgccagcttcatgttgccggtgccagaggcttctttacccgcggtggagatctgctcggagatatccgccgccgggatcagtttttctgctgccgatacacaatagtccggcaggaagaccaccttcagcttatcgccgactttcgggtcgttgttgatcgcttccgctaccttattgatggcaaaaataatgtttttcgccagatagtagcccggcgccgctttcgcgccgaacaggaaaacgcgcggtacgcggtcggactgcgggttttcgcggatctctttgtacagcgcaaggatatgcagcaggttaaggtgctgacgcttatactcgtgcagacgtttgatctggatatcgaagatcgcctgcgggttgatctcaatcccggtacgctgcttcacaaactcagccagatgaactttgttggcctgcttgatatcgcgataagtctgacggaacgccgcatcgtcagcatatttttccaggttgatcagctggtcgaggtcattggcccactcttttttcagcgtctcatccagcagcgaggccagcgccgggttgcactgcttgatccagcggcgcggcgtgatgccgttggtcacgttatggaatttgttcggccacagctggttatattccgggaacagatcttttaccaccagatccgagtgcagcgccgccacgccgttgacagcaaagccgcccaccacgcacatgttggccatccgaacctgtttgtcatgcaccaccgccagcttcgcccagacctgcttatcgcccggccaggttttgtccaccagctgtttaaagcggtcgttgatctctttaatgatctgcatatggcgcggcagcagcgcttttaccagcttctcatcccagcattccaacgcttccggcatcagggtgtggttggtgtaagcaaaggttttgctggtgatcgcccaggcgtcgtcccagctcagctggtgctcgtcgatcagcacgcgcagcagctccgggatggcgatggtcgggtgcgtatcgttcagctggatcacttcgtaatccgccagttcggccagcttgcggcctgccagatgatgacggcgcaggatatcggccactgagcaggcacactggaagtactgctgcatcaggcgcagttttttaccggcctgatggttgtcgttcgggtacagcaccttggtcagtttttccgcgtcgatgccctgctgctcggcgcgcaggaaatcgccatcgttgaatttggtcaggttgaacggatgagcgtgtttggcctgccacagacgcagcggctgggcgacgttgttgcgatagccaagcaccggcaggtcccaggcttcgccggtaatgacgaacgccggctgccattcgccgtttttgctgactttcccgccgatacctacctggacatccagcgcttcgttatgacggaaccacgggtagctgctgcgcccccagtcgtcaggggcttccatctgctggccatcgtcaaatgactggcggaacaggccatactggtagttgagaccgtaaccggtcgccgactgccccaccgtcgccatggagtcgaggaagcaggctgccagacgtcccaggccaccgttacccagcgccgggtcagtctcttcttccagcagatcggtgaggttgacatcgtagcctttcagcgcgtcgctgacgccctcgtaccagcccaggttgagcaggttgttgccggtcagacgaccaatcagaaactccattgagatgtagttaacgtgacgctgtccttgcgccggtttcgctaccggctgcgccgccaggagttccgccaacgctccgctgactgcgcgccaccattgacgctgtgtcatctcggaagcggactgtaaaccaaaatgctgccactgacgcgtcagtgcagcctgaaactgagctttgttaaatgtagtctgtgacataatgagatccgggtcctttactaaaacgatggcgctagtgtgccgacctcccgattcatcgtcctcatcctgacggggattagacagggaggagtggcggggatgagcgaaaagtgtgatcctgaacactatagtgtgggcgagaaggcaaaaatatgctgtaaaaatcaccgcgatatgacaattgagaggttacctccggtagctaaaaatttgttacaggccaatacgcgtaaaaaatcttccagttcctcgccacgttattaacaaaataaatagaggcccctgaagaaataagcacctttcatcgcattgacccgcaaaaaagattacttctaagaaatcgctgacaataatttaataaaaacaaacaactactcttagcgtaaaataaatccacccacactccgccagctaccgcctgaaaaccgcggccgaccagtcctgcctgcgattttttcccattctcagccaatgtcaaaatttgtgacatagagcaaattcaagagcataaacttcggacataacttgcaataaatttcataatcaccgaccttattagatattaattacgaagcgcaaaaaaaatcgcaacctctctcttgcacagcgaaatgtagaactatgttgattccgtccaaattaagtcgtccggtccgccttgaacacactgtggttcgtgagcgcttactggcgaaactttccggcgcgaacaattatcgtctcgtgctgatcaccagtcctgccgggtacggtaagacaacgctcatttctcagtgggccgcgggtaaaaacgatcttgggtggttttcgctggacgaaggcgacaaccagcaggagcgttttgccagctatctgatcgcggcgattcagcaggctaccggcaaccactgcgcggccagtgaagcgatggtgcaaaaacgccagtacgccagtctctcctctctttttgcgcagctgtttattgaacttgccgactggcagcgcccgctgtatctcgtcattgatgattaccatctgatcaataatccggtgatccatgacgcgatgcgctttttcctgcgccatcagccggagaatatgaccctggtggtcctgtcgcgtaacctgccgcagctgggcattgccaatctgcgcgtccgcgatcagcttctggagattggcagtcagcagctggcctttacccaccaggaggcgaaacaatttttcgactgtcgtctgacatcgcctatcgaagccgacgacagtagccggctgtgcgacgatgtcgccgggtgggccaccgcgctacaactcatcgccctctccgcccgccagaataactcctccgcccaacactccgcccgccgcttcgccgggattaacgccagccatctgtcggattatctggtggatgaagtgctggataacgttgacgcccgcacgcgcaactttttgctgaagagttctctgctgcgctcaatgaacgacgcgttaatcgtgcgcgtcaccggcgaagagaatggccagatgcagctggaggagatcgaacgccaggggctgttcctgcagcggatggatgattccggcgaatggttccgctatcacccgctgtttggcagcttcctgcgccagcgctgtcagtgggagctggcggttgaactaccggagatccaccgcgccgcggcggaaagctggatggcgcaaggtttccccagcgaggccatccaccatgcgctggcggccggcgatgccaaaatgctgcgcgatatcttgctcaatcatgcctggggcatgtttaaccatagcgagctggggctactggagcagtcgctggcggcgctgccatggtccaatctgctggaaaatccgcgcctgatcctgctccaggcctggctgatgcagagccagcatcgctacagcgaagtcaataccctgctggcgcgcgccgagcaggagatgagtgtggaaatggacaccgcgatgcatggcgacttcaacgcgctgcgcgcgcaggtggcgattaacgatggcgaccaggacgaggcggaacgtctgtcaatggtggccctggaagagctgccgctggccaactattacagccgcatcgtcgccacatcggtgcatggcgaagttctccattgtaaggggaagctgaccaaatccctcgccgtgatgcagcagaccgaacagatggcccgccgtcacgacgtatggcattacgccctgtggagcatcattcagcaaagcgaaatcctcttcgcccagggcttcctgcaggccgcctgggagagccaggagaaagccttccagctggtacgcgaacagcatcttgagcagttgccgatgcatgagttcctgctgcgcatccgttctcagctgctgtgggcatgggcgcgcctcgacgaggctgaagcttgcgcccgccaggggatggacgtgctatccacctatcagccgcagcagcagctgcagtgcctggcgctgatggtccagtgctcactggcgcgcggcgatctggataatgcccgcagccacctgaaccggctggaaaacctgctcggtaatggtcactatcacagcgactgggtctccaacgccgataaggtgcgagtgatctactggcagatgaccggtgataaaaccgcggcggccaactggctgcgccagacgccaaagccggagttcgccaacaaccacttcctgcagagccagtggcgcaacattgcccgggcgcagatcctgctgggcgacttcgaaccggcggaaatggtgctggaagagctgaacgaaaatgcgcgttcgctgcgtttgatgagcgatctcaaccgcaacctgctgctgctcaaccagctgtactggcagtcaggacgcaagagcgaagcgcagaaagccctgctggaagccctgacgctcgccaaccgcaccggttttatcaaccactttgtgattgaaggcgaggcgatggcccagcagctgcgccagctgatccagttgaacacgttgccggagctggagcagcatcgcgcccagcgtattctgcgcgacatcaaccagcatcatcgccacaaattcgcccactttgacgaagggttcgtcgagcgactgctgaatcatccggaggtgccggagcttatccgcaccagcccgctgacccagcgcgagtggcaggtgcttggcttaatctattccggttacagcaacgagcagattgccggcgagcttgacgtggcggccaccaccatcaagacccacattcgcaacctgtatcagaaactgggcgtcgcccaccggcaggacgcggtacagcatgcccagcagttacttaagatgatgggatacggcgtctgacgacgccgttgccgtttagcacagctccagctgaaggttgttatcagtgatcaccttcagcacgccggccggcggcagcacgtcggtatagaccgcatcgaccatactgatgctgcccatgttgaccatcgcattgcggccaaacttggtatggtccaccaccagcatcacgtggcgtgaattctcaatgatcgcccgcttggtgcgcacttcatgataatcaaactccagcagcgagccatcgctgtctacgccgctgatgccgagaatgccgaagtcgaggcggaactgcgagataaagtcgagggtggcttccccgatgatcccgccgtcccggctacgcagttcgccgccggcgagaataatgcggaagtcctctttcaccatcagcgtgttggcgacgttaaggttattggtcacaatccgcagatcgttgtgatcgagcagggcgtgcgccaccgcttccggcgtggtgccgatatcaataaacagcgtcgccccgtccgggatctcgctggccacccgccgggcgatacgctctttctccgccgtctgggtcgctttgcgatcgtgccaggaggtgttcaccgagctggagggcagcgccgcgccgccgtgatggcggaggatcattttctgttcggctaaatcgttcaggtcgcggcggatggtctgcgggcttaccgcgaactgctcaaccagctcttccgtgctgacgtaaccctgtttttttaccagctcgataatggcgtcatgacgttgtgtttgtttcatgaaatatccctggaaaaatatcgcctacccgacccctgtcggtaagtctttatgcgcgttttcgcccatgtaaggtatcaacaaacgccatcgccaggccggtcgccagaccagccacgtgcgcgccgttggcgatcgccatgccgaaaacgtcaaaccagccagcaattaaccacactaaagagaagagtatcaacccgcgctgcagataaataccgctctgcggatcgcgctcgccccgtagccagacgtagcccatcagcgcgtagaccacgcccgacaagccaccaaaccacgggccgctaaactggtgctgcacgaagccgctcagcagagcgctgatgacggtgatcaccaccagcttgccgctgccgatgcgcttttccaccgcgccgccaagataccaccaccatagcaggttaaagagaatatgcatcagcgagaaatgcatgaaagcatggctgaaatagcgccaggcttcgaactgcagcgaaggatcgtagggccaggccagccaaatcatcaccggctgatcgcccagcagattttgcaggatgaacaccgcgatgcagatcagcagaatcgcccaggtgaacggaccggcgttatgccgcagcgtggcaaagaaaggaaagcgctgatagcgcaacccgctattggtctgtccggactgccagcttgccgccagatagcgcgggtccgccgggttttcgagaaaacgcgccagctcagccctgacgcgcccggcctgactctcatcagccagccagacgtcgctctgggtatgctgctggatggtcaggataatcccctgcgtcgccatataatcgacaaacgcctgggccacccgcgggttggcaaaagaggtaatcattaacatgcagcgaatcgcttattccacacaaagggggatagtatacctgccagtcgttaaaacgtcccgcgcgccacttccgccgggaaatggcgatgccaggcgtcgaacccgccgtcaacgctatagaccttatcaaacccctgctgcagcagatactgcgcggcgcccttgctgctgttgccgtgatagcacatcaccatcaccgccgtgtcaaagtcgttgtcacgcataaacgcgcccagcgtatcgttggtcagatgaaacgcgcccggcgtatgacccatcgcatagctttgcggatcgcggatatcgaccagtaccgccgtctgctgatgcagtttctggtgcgcttcttcaacattgatgcattcaaactgttccatgattctcttctctttcttgtcatgacgggcgatggccggcccaattttaccctgtagtgtaccgtcaggcggtaaagaaacgccaatatgttacacccatcacttcaaaatgtttttttgatgttaccaaaagcgcgtttgtttgctatagtgagcgatatcgagcatttatgagcttaaacgaaagtgtgagagggtaagaacgtggaaaccaaagatctgattgtgataggcggaggcatcaacggtgccggtatcgcggcagatgccgccgggcgtggtttatccgtactgatgctggaagcgcgcgatctcgcctgcgccacctccagcgccagttccaaactgatccacggcgggctacgctacctcgaacactatgagttccgtctggtcagcgaagcgctggccgagcgtgaagtgctgttaaaaatggccccgcatatcgccttcccgatgcgctttcgcctaccgcatcgcccgcatctgcgcccggcatggatgatccgtatcggcttgtttatgtacgatcatctgggcaaacgcaccagcctcccgggatccaccgggttgcgttttggcgcagaatcggtacttaaaccggaaattgtgcgcggtttcgaatattccgactgctgggtcgacgatgcccgcctggtgctggccaacgcgcagatggtcgtccgcaaaggcggcgaagtgcgtacccgcacccgcgctatctcggcgaaacgtgagaatggcctgtgggtggtggaagcggaagatattgataacggtgagaagtttacctggaaggcgcgcggcctggtcaatgccaccggcccatgggtcaaacagttcttcgacgaagggatgcatctgcgctcgccttacggcatccgtctgatcaagggcagccacatcgtggtgccgcgggtgcatacccagaaacaggcttatattctgcagaacgaagataaacgcatagtgtttgttattccgtggatggatgagttctctatcatcggcacgacggacgtcgagtataagggcgatccgaaagcggtggccattgatgataaagagatcaactatctgctgaacgtctataacgcgcactttaaaaagaccctcagccgggacgatatcgtctggacctactccggcgtccgtccgctgtgcgacgacgagtcggattcgccgcaggccattacccgcgactataccctggatattcacgatgagaacggtcaggcgccgctgctgtccgtcttcggcggcaagctgaccacctatcgcaaactggccgagcatgcactggaaaaactgaccccctattacaaagggatcggcccggcatggaccaaaaccgcggtgctccccggcggcgatatcggcggcgaccgcgacgactacgcggcaaaactgcgccgtcgcttcccgttcatcagtgaatcactggcccgccattatgcccgcacctacgggagcaacagcgagtggatcctgaaggaagccagcgcactgagcgatctcggggaagatttcggccacgagttttatgaagccgagctgaaatatctggttgagcacgagtgggtgcgcagcctggatgacgccatctggcgtcgaaccaaacagggtatgtggctgactgccgagcagcaggcgcgcatcagcgaatggctggcgcagcatgcgggaaagtctgaactgtcgttagcgtcctgacatcgcgtggcgccaggagagaaatacccgggctatggcttgcgcttggcccggatacctgttcacaaattaaacgagactttttttccagtcggcaatgtgacatttatactgagttctccccccaatgccgcaatgtagcgttttagggtcgaaagccgagggtcgttatcagtctgttccattttagcgatcgttggctgctttacccccatagccgcagccatctctgtttgcgacatttgcaactcttctcgaagcaagtttaaagcgacagactggcgtatctctgccgctttcgctgcaatacgctgctggctttcaggactctgtttcgccatgagttcttttagcgtggccattatcgctccttagtcaggtgttggctgaattctctgtcagccagagtattcatctctttgtaaaaacgtttctcattcatgccatccttattgcccgcacataaaacgatagctttccgcagaggatcaaaagcaaaaaaggcgcggatggggagcccatgatgctgaacccggagttctttcatattctgaaacgttgaatctttcaccgtatcaacatacgggcgcccaagctgcggagcaaactcagacaagatgagcatcgtggccaacatatcctcttttaaagctctactttgtaattcgaaccaggcatcaaacgtatccgtcgtttctacatcccacataggctatgaacgtaaacttattgagcatttatcgtactgctggcgaattcacgtcaatagtatattcccgcaatagcctgaatcctccccggcacttttccgaataaaacgttcgccacacaacacaacggggccaaatggccccgttgtgttgtgtggtgttgcattgactggcttacagccttaccgggtcgatatgccagatatatttcgcgtactcctggatcgtccggtcagaagagaagtagcccatgttggcaatattcaacatcgccttataggcccactcttccgggttttgatacagctcgtcgacgcgatcctggcagtccacatagctacgatagtccgccagaacctggtagtggtcgccaaagttaatcagcgaatccagcaggtcgcggtagcgccccggttctgccgggctgaagacgccggtaccgatctgcgtcagcgcctggtggagctcttcatcctgctcgtaatattcgcgtggtttatagccgctgcgacgtagctcctccacctcttccgcggtgttgccgaagataaagatattctcttcgcccacgtgctcctgcatctccacgtttgccccatcaagggtgccgatagtcagcgcgccgttaagggcaaacttcatattactggtgccggaagcttcagtgcctgcgagggagatctgttccgacaggtctgccgccggaatgatcagctgcgccaggctaacgctgtagttggggataaagacgaccttcagcttgtcgccaatctgcggatcgttattaatcaccgccgccacatcgttgatcaggtgaataatgtgcttggccatatagtaggccgaggccgccttaccggcgaaaatattcacccgcggcacccactcggcctgcggatcggccttgatccggttatagcgggtgatgacgtgcagcacattcattagctgccgtttgtattcatggatacgtttgatctgcacatcaaacagcgccttcggattgaccaccacattgagctgttgagcaatatagctggccagccgctgtttgttctcaaacttggcctgacggaccgcctgattgaccatcgggtagtcgatatgctgtttcagctcatcaagctgactcagatcggtccgccaggtgcggccgatatgctcatccagcactttcgacagcggcgggttggccagcgccagccagcggcgcggcgtcacaccgttggtcacgttgataaagcgcattgggaagattttggcgaattcggcaaacagtgactccaccatcagtcgggaatgcagctcggacaccccgttgaccttgtggctgaccactaccgccagccaggccatccgcacacggcggccgttagactcgtcgataatcgaggtgcggctgaggaggtcggtatcgttcggatactgctcctgcaaggtcttgaggaaatagtcgttaatctcgaagataatctgcagatggcgcggcagaattttacccagcatatccaccggccaggtctcgagcgcttcgctcatcagggtgtggttggtataggagaagacctgacaggtcacctcgaacgcctcgtcccagctgaacttatgttcgtcaataagcagacgcatcagctccggtatcgacagcaccgggtgggtgtcattcaggtgaatggcaatcttgtccgccaggttgtcataggtcttatgcaacatataatggcgactcaggatatcctgcaccgtggccgacacgaggaaatactcctggcgcaggcgcagctcgcggccggagtaggtcgagtcgtccggatagagcacgcgggagacgttttcggagtggtttttatcctctaccgcggcgaagtagtcgccctggttgaatttaccgaggttaatttcgctactggcctgcgcgctccacagacgcagcgtgttggtggcgtcggtgtcaaagccggggatgatctggtcgtaggcttccgcaatgatctcctccgtctcaatccagcgggttttctttccttcctgctgaatgcggccgccgaagcgcactttatagcgggtgttgtggcgctcaaactcccacgggttaccgtactccagccagtagtcaggagactctttttgccggccatcgacaatattctgtttaaacatcccgtagtcgtagcggatgccgtaaccgcgtcccggcagacccagcgccgccagggagtcaaggaagcaagccgccaggcggcccagaccgccgttgccaagcccggggtcattctcttcatcgatcagctcttcgagatcgagccccatctccgccagcgcgctgctcacatcgtcataaatgcccagcgacagcagcgcattcgagagggtgcggccgatcagaaactccatcgacagatagtacacctggcgcacttcctgggagagctgcgcgcggttggagcgcagccagcgctccaccatgcgatcgcgaacggcaaacagcgtggcgttaagccattcatgcttgttggcgatggccggatctttaccgatgataaacatcagtttataggcaatagaatgctttaacgcctcaacgctcagcgtcggtgatgcatagctaaagggtacattcataacaatgactccagtggttacatcaagcgttgataaagttcgcgataggagttcgcggcaacctgccagctaaaatccatattcatcgcctgacgctgcacgtagcgccagagcgacgggcgcgaccagaggacaaaggcgcgacggatagcgcgcagcaatgacagcgcattgctgtcctcaaagacaaaccctgtcgccagaccatcggccagattctccagcgaactgtcagcgacggtgtccgccagaccgccggtgcggcgcaccagcggcagcgtcccgtacttcagaccatacagctgggtcaggccgcagggttcaaagcgactcgggaccagaatgacgtcggcgccgcccataatgcggtgggagaaggcctcatggtagccaatctgcacacccactttgcccgggtgttcggcggcggcggcgaggaaaccttcctgcagcaccggatcgccggcgcccagtagcgccagctggccgccctgctcaagcagacccggcagcgcttcaagcaccaggtccagccctttctggctggtaagacggctgacgacggcaaacaacggcgctttatcatcgaccttcaggcccatggcaatctgcagctgacgcttgttctccgccttctcctccagcgtgtcgcgatcgtagcgcatcggcagcagcagatcgttttgcgggctccagataccgtcgtcaacgccgttgagaattcccgacagccggccttcatgatggcgctggcgcagcagcccctccatgccgtaggcgtactgcggctcggtgatctcgcgcgcgtaggtcgggctcaccgccgtaatatggtcggcgtagtagaggccggccttgagaaacgagatctgcccgttaaactcgaggccatgcatgttatagaacgaccaaggcagctcaatgtcattcatatgccaggagtaaaacatcccctggtacgccaggttgtgcacggtaaacaccgatttagccgggcgtccgcgcgccgccaggtaggccggcgtcaggccggcgtgccagtcatgggcatgcaccacatccgggcgccagaacggatccagtccgctggccatttcacttcccacccagcccagcagcgcaaagcgcaggacgttgtcgggataagcgtgctggttggtatcgtggtaagggctccccggacggtcatagagatgcggggcgtctatcaggtagatccccacgccgttaaagtggccgtacagcagcgtgatccgcccggcgaaggtatcccggcgggtcaccacctgggcatccaccacgccgcgacggatatcgggaaacgccggcaacagcacgcgcgtatcgataccctccgcgatttgcgccgccggcagtgcgccgatgacgtccgccagaccgcccgtctttaacagcgggaacatctcagaacatacatgtaagacctgcattagcgctcctgtttgtgccctaatttccgcagcatgtcgcgggtcaccagcacgataccttcctctgagcgatagaagcggcgtgcatcctcttccgcattctcaccaatcaccattccttccgggataacacaggcgcggtcaatcacgcagcgacgcaggcggcatgagcgccccacccagacatctggcaacaagactgccgaatcaatgttacagaacgaattcacccgcacgcgcgggaacagcaccgactgcaccaccaccgacccggagataatgcaccccccggaaaccagcgagttcaaggtcatgccgtggctaccggagcggtcctgcacgaacttcgccggcggcagcgattccatatgggtgcggatcggccagttctggtcgtacatatccagctccggcgtgactgacgccagatcgaggttagccttccagtaggcttccagcgtccccacgtcgcgccagtaaggttcggcgttcgggtcggactgcacgcaggagagcgggaaaggatgtgcataagccatgccagcttcggtgatcttcggaatgatgtctttaccgaaatcgtggctggagttctcgttgcgatcgtcttcttccagcagctcataaagataggcggcgtcaaagacataaatgcccatgctggccagcgatttggtcgggtcggtcggcatcgccggcgggttggcgggtttctcgacaaactcaatgattttttcgttttcgtcgaccgccatgacgccgaaggcggatgcctcttcaatgggcaccggcatgcaggccacggtgcaacgcgcccctttttcgacatggtcgatcagcatgcgcgagtagtcctgcttataaatatggtcgcccgcgaggatcaccacgtactcggccttgtagcggctgatgatatccaggttctgcgtcaccgcatccgccgtgccgcgataccaattttcgccatgcacgcgctgctgagccggcagcagatcgacaaactcgttcatctcttcgctgaagaacgaccagccgcgctggatgtgctgcaccagcgtgtgcgactgatactgggtaataacgccgatgcggcggatccctgagttaatgcagttagataatgcgaaatcgataatacggaacttgccgccaaagtgaacggcaggtttcgcacgcttaatggtgagatccttcagccgggtgccacgcccgcccgcgaggatcaacgccacggatttgatgggtaattgacgcgccagcatcagcggatcgtttttttcaagcctaaccatgattaactcctttttacacccccgctttccagctcatcccgccgcgccgccgccacgggtccaaccgaaagcttcagggcttacgacctttgaaatacgcacactccgtgcgcgggcccatgccagacagccatgatgaccggattatcctctccggcgaatggaggaacggcgcgccattccccctcgggtaaaaccatatccaccacctctgcggtggcgttcagcgtgagcagccagcgatccgacaactggatctgcatacacgcggccccctgctgccactccgcggcagtcaggggctgggcgttgcgattaagccagcggacgttgccatccccctcctgccaccagcggttgcgggtgagcgccggaatacggcgccgcaggtggatcagcgccgcggtaaaggcggttaatcccgggttcgcctggcgccagtccagccacgtcagggcgttgtcctggcagtaagcattattgttaccgtgctggctgtggccctgttcatcgcccgccagcagcattggcgtcccctgagccagcagcagcgtcgtcagcagcgcatgcgcgctggcgcgccgccgttcaatcaccgcaaaattcgcttctaatccttctataccatgattgttgctgtagttattgttagtcccatcgcgattctcctccccgtttgcctcattgtgtttctgattgaaacaaacgcagtcgcgcagcgtgaagccatcgtgggccgtcaccaggttgaccgtcgccgatggcggcttgccatcgcgggcaaagagatcgctggaggccgcgaaacgttgcgcgaaatcccccagggagacattttgctgtagccagaagcgtcgggcgctatcgcgaaaatggtcattccattcagcgaacagcggtgggaaattacccacctgatagccgcccggaccgatatcccagggttccgcaatcagtttcacctgcgacagcacgctgtcgcggcggatagcctcgaacagcggcgcatcctggcggaattccggcgtccgccccatcactgaggcgaggtcgaagcgaaagccgtcgacatggcactcatccacccaaaagcgcaaacactggcgcgcccactccaccacgccggggtggctaagattgagcgtattaccgcacccggtccagttgtgataatcgctatcctcccttacccaataatagctacggttgtcgattccgcgcagggagacggtgggcccttcgagatcgatttccgcactatggttgagcacgatatccagaatcacttcgataccggcggcgtgcagcgccttaaccgcatcgcgaaactcatccagggcgcgatccgggtcgctggcgtagcgcggatccagcgcgaaccacgccaacgggttgtagccccagtagttgcttaaccccatccgctgcagtcgcggctcgctggcgaactgcgccaccggcaacagctcaagggcgctgatgcccagcgatttgaagtaagcgatcatcgccgggtggcccagcgctttataggttccgcgaatggcttccggtagctgcggattaagcaaggtgagccctttcacgtgcgcttcataaatcaccgtttccccccatggggtacgcggcggtttatcgccacgccagtcatagcgcagatccaccacctgcgattttggcgcgaccgcggcgctgtcgcggcgatcgggctgccacatgccgccgtgcaggcgctcatcgtcaggcagatcgccctcgacccggtgggcgctgggatcgatcaacagcttggccgggttaaagcggtgcccctgcgccgggtcccagggaccatgtacccgatagccgtagcgcaggcccggcccggcggcggccagccagccgtgccagatgtcgccgctgcgcgccgggagatcgaagcgttgctcgttgccctgctcgtcgaatacgcacagctccacccgctccgcatgggcggagaagagggcgaaattcacccccttgccgtcatagctggcgcccaatggcgcaggtttgcctgccgcgagtgaggtcattgcgcctcccggaccagccagatcgtcgccagcgggggcagggtcagcgatagcgaatgttcgcggccatgactggcgatagcgtcgctttccaccacgccgccattgccctgattgctgccgtgatagtgcatggagtcggtatttagcgcctcgcgccagcggcccggctggttaatgccgaagcggtagtcgtggcgcggcaccggcgtgaagttgctggcgacgataatctcgttgcccgcccggtcacggcgtacaaagacaaacaccgagcgctcatggtcgtcgaccaccagccattcgaagccgtaggggtcaaaatccagctcgtgcagcgctttatgatgacggtaggtatggttcaggtcgcgcaccagccgctggacgccgtggtgccagttgtcgccgccctccagcagatgccagtcgaggctaacgtcatggttccactcgcggccctgagcgaactcattgcccataaacagcagctttttccccgggaaggcgaacagccagccgtagtaggcgcgcaggttggcgaacttctgccaggcatcgcccggcatgcggtcgagaatcgattttttgccgtgcaccacttcatcgtgggagagcggcagcacaaaattctcggtgtagttgtagagcatgccgaaggtcattttgtcatgatggtagcggcgatgcaccggatcgagcttcatgtaatccagggtgtcgtgcatccagccgaggttccatttgaaccagaaaccgaggccgccgccggctggcggacgggtcaccccggcaaaatcggtggactcttccgccatggtgaccgcgcccggcgtctgttcgccaaggatgcggttggtgttgcgcagaaactcaatggcttccagattctcccgaccgccgtattcgttggggatccactctcccgccttgcggctgtaatcgcgatagatcatcgaggccaccgcgtcgacccgcagcgcatcgatgccgaagcgttcgatccagtacagcgcgttacccaccaggtagttgctgacttcccgacgtccgtagttgtagatcagggtattccagtcctggtgatacccctcgcgcggatcgctgtgctcatacagcgaagtgccgtcaaacgaggcaagggcaaaatcatccgccgggaagtggccgggcacccagtcaagaatgacgttcagcccggcggcgtgcgcggcattgataaagtaacggaaatcgtcgcgggtgccgaagcggcgggtcggcgcatagagcccggtgggttgatagccccagctgccgtcgaacgggtgctcgttaaccggcaatagttcgagatgggtgaagcccatccatttcgcatagggcaccagctggtcggccagctcgcggtagctcagccagaaattattatcggtatgacggcgccaggagccgagatgcacttcatagatagagatcggggcatcaaactggttcgccgctctgcggtccgctggctgttccactttgggcggcaggtcgcagataagcgaggcgctttccggacgcatttgcgactcaaaggcgtaagggtcggctttgacccgcagattgccgtgggcgtcaatcagttcgaatttatacagctggccattgtgcgcgccgggaacgaacagctcccagatcccggactctttgcggaatcgcatcgggtggcgacggccatcccagtagttaaactgccccaccaccgatacgcggcgggcgttcggcgcccacaccgagaaacgggtaccggtgacgccgtccatggtggcagcgtgcgcacccagcgtttcataagggcgcaggtgggtcccttccgacagcagccagacgtcaaggtcctgtaacagcggaccaaagcgataagggtcatcgatcagattctgctgcccgtgccaggtgacggctagctgatagcgaaaagcgtttttacgccgcggcaggacgccgctgaagaaaccacgcgagtcgagacattcgagcttgccgactttgcgtccggttttcggttcaataacccacacgtcggtggcatcgggtaataatgcgcgcacttccagcccggcgtcagtacggtgcatgccgagcacggaaaagggatccgcgaaatgaccggcgattagcgcattaatcacgtctctatcaatatgattagacatgctttcatcctgttgtaagtgtcgctcattcctgtaactggcgactttttttgacctgaacggcgcagtgctctcagcatcctcctgctccgtcccaccttcaggtaaggaattccttacttaaagcatagccaaggctgagttacctccgtggggaaaaatctaacatccgcgtttactccttgtattacgcaaaaaaaaagggggcttgaagaccccctttctgttcatcctgggcttacgccagctggcgaagcatccggcgcagcggctccgcggcgccccacagcagctggtcgccaacggtaaaggccgatagatactccggccccatattcagtttacgcaggcgtcctaccggggtggtcagggtgcccgtcaccgcggctggggtcagctcgcgcatggtaatctcacgatcgttcggtaccactttggcccacgggttgtgcgcggccagcagctcctcaacggtcgggatagaaacatctttcttcagcttgatggtaaacgcctggctgtggcagcgcagcgcgccaacgcgaacgcagaggccgtctaccgggataacggacgaggtggcgaggatcttgttggtctccgcctggcctttccactcttcgcggctctgaccgttatccagctgtttgtcgatccacgggatcaggctgcccgccagcggtacgccaaagttatcgaccggcagctcgccgctgcgggtcagcgacgtcactttgcgctcaatatccaggatggcggaagccgggtccgccagctccgcagccacatgattatgcagctgccccatctggctcagcagctcgcgcatatgacgcgcgccgccgccggaagccgcctggtacgtcgccacgctgacccactccaccagatcctgagcaaacaggccgccgagggacatcagcatcaggctgacggtgcagttgccgccgacaaaggttttcacgccgttgttcaggccggcggtgatcacatcctggttaaccgggtcgaggataatgatcgcatcgtccttcatgcgcagcgaagaagccgcgtcaatccagtaaccctgccagccgcttgcgcgcagcttcgggtaaatctcgttggtgtaatcgccgccctggcacgtgacaataatgtccagcgccttcagcgcgtccagatcgaacgcatcctgcagcgtgccaccggtgctaccgccgaatgacggcgctggctgtcccagctgggaggtagagaagaacaccgggcgaatggcgtcgaaatcgcgctcttcaaccatgcgttgcatgaggacagagccgaccattccgcgccagccgataaaaccaacatttttcataacgtattcctgcgaggtgtgtgctgtttgtgcctggccagtttccaactggattatccctcaccttacaaaatgcagctaaagtcgcaagtgaaattaatcaatgattgctgaacaatcagaaaagcaacttatcctgcacattgtccaccgtcgctggtcgtcgtcaaaagcgcaacgattatcggggaaatcccccggggaatggaatattttccgtcgctattttattgatcctgattatggattaagcgtgaaatctggtgcttttccgcttgccaaaaaaaagcgacaaacccagtcacagcaagggctgacgagggatacgagcatcgtcgtagcgctaataagggccaatagctggcaaggaaaagagggaaaaagggcggtttattgcaaagaagccagggtaagcagcgttaccctggctttttatttcccgcgagcgggagatgagcgggcttagctcagcagctggaaggcgatcataccgacaatcgccccggtggtgccaaggatggtttccatcatggtccaggtcttcagcgtctgggcttcactggcgccggtaaatttaccaaacagccagaagccggcgtcgttcacgtggcttaccacaatcgagccgccggcgatacagatagacaatgccgccatctgcgcgccgctgtaattcagctgctcaatcaccggcatcaccaggccgaccgccgtcaggcacgccacggtggcagagccctgaatgatacgcaccgccgccgccagtacgaagcaggtaatggcgatcggcagccccattccggtcagcgcttcaccaagcgccgggccaacgccggagtcaaccagcacctgcttgaagacgccgccagccccgatcaccagcagaataatcccggccggctgcagcgcgtggccgcaaatctccatcacccggtctttcgccattccctgacgtaccgccaggccgtaaatcgccaccaggcaggccaccaggatcgcggtgaacgggtggccgataaactcgaaccattcgtaggcagtggaacccaccggcacaaagcgcgcggcgatggttttcaggccaaccagcaccagcggcagcaggatcagcgccaggctgaagccgaaggagggcatcttgccttcgccgagatgcggttccgtgacgtcgtcaggaatatgtaattcgacgtagcggctgatgaagttgccccatagcggaccggcgataatcatccccggaatggccgcgcacaggccaatcaggatcatccagccaaagtcggcgtgcatttgcgacgccagcagcatcggcgccggtccaggcaacagaaacgccgcggcggcggcaacgccggcaaacagcgggatcaccagcttcacgaggttagtaccggtatggcgcgccatcgagaaggcgacgctaatcagcagtacgatcgccacttcgaagaacaacggcagcgcgcagatgagaccggcgagaccaatcgcatagtgcgcgcgattgtggccaaaggatttgagcatcttgacggcaatctgatcgaccgcccccgtttcatgcaggatcttaccgaacatcgcgccgagcgcgacgacgatcgccaggaagcccagcgtaccgcccatccctttctccatcgtcgccgcgattttatccagcggcatgccggagaagaggccggcgccaatagaaaccaccatcaaagccacgaaggcgtgcattcgcgccttcatgactaaaaacagcagcagcaataccgagccgactgctgttaaaacaagcgttaaagtactcactagtgactgcctttgttgatcacctcgatggtgctggccaccacgccttccagcggctggtcgatatcgacgataagcacatcgctctcgtcggcgcctggttcctgcagcgtttcaaactgcgtcaccaacatttgggttttaaagaagtgccctttacgcgccttcagacggctttcgatcacgtcgaaatcgcctttcaggtagatgaaggagaggttcgggttgcccttgcgcagaatgtcgcgatagctcttcttcagcgccgagcagacgatcagcgacaccttgttggtacgctgcatggcgaacgcggcgtcatttagcgcctgcagccacggcgtgcggtcgtcatcgttgagcggctcgccggaggccatcttggtgatattgctgcgcggatggagaaagtcgccgtcaagaaacgcggcatgcagttgatgcgccacttcgctggcgacagcggattttccgctgccggaaacgcccatcaggacatagacgtggtgatcatggttagtcgtgctcaaagcgtcctcccactggactggtacgccgcgccggggctgactcatccagcgcgaaggcggcgtatcggttaattgttacgggtaactgttatcggtaacattgtcatgccggacctgtggagaagcaatatccattcgtgccagatgtgaatatgtgtgatctacttcaaacttgtcagtttaaattgatccgcccggtgacaatgtgaaacctaaatctaacatcttaggggtaatcgcttcaccacgaatgcgcgccagcagccgttcggcgccgatgcgccccatccgctcgcgcggggtcaggacgctggccagccgcggctccatcacctggccgatatcatggccgtggaacccggcgatcgccatatcatcggggatcttcagtcccagacgctggcactcgaacgccgcgccgaccgcgaggtcatcgttggtgcagaaaatgccgtcgagctgcggatattcgcggcgcgcctggcgcatcagctcaatccccgaagaataggacgaggattgctccaccatcacgctgtagggcgtcatcccggcgtcaagcattgcctgctcgtaccccttctgtttgatgatagtacgttcatcaagacgcgcccccagataggcgacatggcggtggccgcgggcgatgatcgccgcggtcatctgccgggcggcttcaaagttatcaaacccgacggcaatatcgagacacggcgaccggctgtccatcagctccaccaccggaatgccggcgacttcgatcatcttcagggtgcgcggcgtatgggtgcgttcggtgaggatcaggccatcaatgttccaggagagcatcgattcgaggcgtttctcttccatttccggcttatagccgtagtgcgccagcatggtttgatagccgaaggcgtcggtgacgctttcgataccgcgcagtacttccgaaaagacctgattggttaacgacggcagcagcacgccgatggcgcggctggtggcgttggaaagaatgtcaggggcgcgattgggaatataacccagttcatcgagggcaacggcaatcttgccacgcagcgcttcggagacctgctccgggttgcgtaaatagcgactgaccgtcattttggtcacgccgacaagatcggctacatcctgaagtacgggtcttttctttttcatcgtcctgactgtgatcaacgggaaacattttctcagtttatcacggacaaagcgcaaccttccctaacatgagggaaggctgcgcaatttatttaacctggctcagataactatcaaaccggcggcagatcgaacagcaggatctcgctatcgctgtcggcatgaaccgaaatcgcctgctcgtcccagatggccaaaccgtcgctggtggtggctttggtaccgttgatggtcacttcgcctttgaccacctggatccacacgcggcgttccgcggcaatctggtgaaccgactgctcatctttcagcagcgcccagcgatagagttccatatcctggtacaccttcagcgagccatctcgcgcatccggcgacagcaccagctgtttgccctgggcggcgtcgaagcggcgctgctcgtagcgcggggtaatgccggtttcttccggaataatccagatctgatacagacgcagacgatcggttttgctcgggttgtactcagagtggcgcaccccggtacccgcgctcatgatctggaactcgcccgccggcacctgctctttgttgcccatgctgtcctggtgctccaccgccccttccagcacataggtcaggatctccatgtctttgtgcgggtgggtaccgaagccctgaccggcgtcgatgacgtcgtcgttaatcacccgcagggcggagaagcccataaagttcgggtcataatagttggcgaaagagaaagtatgccaggaatccagccagccatggttagcgtggccacgttcgttcgcttttcgtaaatagatcatgttgcacccccgtatgttgtcgatggagtcagtgtggacccatttcgccggcgatcatagagggtgaaaattgactcctctgttcaaaaaatatgaacaagcgcagaggagccaatttgacttatcgggtaagggtaatggtggccggtgaaggctgctcaaagccgcgctgcaggatctccatattggtgagaacgtcagtttccttgacgtaattcggctggccgttgacgagggtgtcgtacagcgcgtcgtacacccggccataatcgccgctctccagcggcaccgcttcgcgcaccatctcccctgcctcgttgacatacaccagctcgccaacgctgtcgtccgcgccaaatcccggctcgcccggcatgatattggccttcaggctggtctcctgctggtcaatgccgtacttcacaaacgaacctttgtgcccgtgaacgataaatttcgggtaatcgatctgcaccagatggctggtcttaacgatggccttcatatcgccgtagaacagctgggcttcaaaggtgtcatccgggttggctttattgcgcagcgagcgcagatcgtaagagacatggtccgggcggccgaacagcgaaatgatctgatccagggtatgcacgccaaggccatagaactcgccgttttgcggaccgccggggttggtctccgccagcgggcgataattatcgaaatggctttcgatctccaccagttcgccgagtttcccgctctcaatcacctttttggtggtcaggaagcaggagtcgaaacggcggttctgatagggcgtcaccgtcaggcctttgctgttcgccagggcaaacagagtttttgcttcctccagcgtcggggtgaacggcttttccaccagcacgttttttcctgcctccagcgcctttttcgcatattcaaaatggctgtcggcgtgagtgcagaccaccaccagcttgaccagtggatcgtttaatacttcatcaaggtcgctggtgaaatgaatatgggaatactgcggcgcctgctcctcgggcttcgcccggcggcggtaaatgtgcgctacctgccagcggtctttgcggtgcaaaacgtaaggaaggtgatagcgggtggtgcttttaccaaagccaataaatgcgcagtgcagagtcataacgctgtccttagttaatgagctaccttcaaccatagcgcaagccggtccctcacttcatcctctctgtttgcttgcagtgaagattcgttaggaaaatagttcgagtatcactcatacgtaattattaataacctattgattaataagtgattaaatcagcagttttcggcaaaaaaccttgatcgccatggcaaaactgcggataagtggagagcaaaccaggaggttgctgatgactaacggagtagccagccgctgctgatggacaaacagtatctcgccataaacggcgccctttttttctggcttctcgcgctgatcgcctggtctgtcgatgcaagcgcgctggcgcgcctggcggccgcctgcgcgcttatcgctttcctcctccatagccaacggaacaagattaacgcgatgtttattaagaaaaataaaacggaacctcagatatcagaagcagccacgcctccggcaattaacccagaacccgaagcggtcgccagcaaaaaacacgagactacggtcatcgccagcggggtgcatttcgtcggcaatatagtcgccagcggccatgtctatatccacggtcaggtcaccggcaacattgaggccaaagagcatttgattaaggtaatgcgtgaaggccaggtggagggcaacgtcagctgccgggagctaataattgacggcaaggtgcaggggcagtgtcatggcgacagcatcaccatcgaggagcacggccatctggagggtaccctcgcctatcgcgcgctggcgatcaagaaaggcggcgtttttagcggtcgcgctgaactgctggccgccgcggagaacaaaagtcatattctcggtctggtagcagacgcaccctccaaagccgacgcggagcccgtcaggccgcagagcgcctgagatagcagcaaaaaaaaagccagcacccggctggctaaagtaatactggaagcaatgtgagcaatgtcgtgctttcaggctttccgcaagggtctccctgaatgcaggacaataataatcattctcattcgcacttgtctacttttttttgcaaataatgcgtgttgactcgaacgccgtagtcagtgatgtttaaagggacttttcacctgaatgaggaacaaggaatgagtgacatcgtgatacgccatgctgaaccgaaagatattgacgcgattcgtcaaattcacgcccagccggaggtgtatcacaacacgctacaggtccctcatccatccgaacatatgtggcgggagcggctaaccgatacgcccggcgtgaagcagctggtggcctgtatcgatgagcaagttgtcggccatttaagcattgccgtcgtccaacgtccccgccgtagccacgtcgccgattttggtgtcagcgtggattcgcgctggcacaaccgcggcgtcgccagcgcgctgatgcgtaccatgattgatatgtgcgacaactggctgcgcgtcgagcgtattgagctgacggtgttcgccgataatgccccggcgattgcggtgtataagaagtacggctttgagatcgaaggcaccggcaggcgttacgcgctgcgcaacggtgagtatgtggatgcgtattatatggcgagaatgaagtagcgtgttgccgggtggcggcttcgccttacccggcctgcgttcgtgcagttgtaggcccggtaagcgcagcagcgccaccgggcaacacatcaataccccgccgttaaatcatccggcgaacgcggatcggaggcgccatacagcatgccgtccggccccaccatgatgctctgggtactgcccatcgcctctttcagcgccactttctgccccttcgcctccagcagcttcagggtatccgggctaaagcctttctccacccgcagctcatccggcagccattgatggtggaaacgcggcgcgttggtggcttccgcgacgttcatcccgaaatcgatggtattgaccaccatctgcagtacggtggtgatgatccgactgccgcccgggctgccggtcaccagccaggttttgccatctttcaccacaatggtcggcgacattgacgacagcgggcgttttttcggctccaccgcattggcgtcgccgcccaccagaccatagacgttaggcacgccgggcttcgccgagaaatcatccatctggttattgagcagaatgccggaattaccggccacaatgccggtaccgaaggtcgtattcagtgtataggtcaccgccaccgcattgccgtctttatcgaccaccgagaagtgggtggtctggttgctttcatagggcgccagcttgcccggacggatctggctggaaggcttcgctttgttgacatcaatctcggcggcgatcgctttggcgtaagccttgctggtcagcgcctgccacggcacgttgacgaagtcagggtcgccgagatattcagagcggtcggcgtaggcgtgtttctctgcctccgccatcacctgcatggcgtcggcgctgccaaaaccatatttctgcatatcgaagttttcgaggatattgaggatctgcacgatatggatcccgccggaggacggcggcggcatagagtaaacctcatacccgcgatactcgccgctaaccggcgtacgctccacggccttatagccggcgagatcggctttggtgattagcccgccgtgctttttcatctcgtcagcgatctggtcggcgatggcccctttatagaaggcgtccgggccgtgctcggcaatcagctccaggctcttaccgaggttcttctgcaccagccgatcgcccttcttcagcggctcgccgttcttccagaagatcgctttactattttcatgctgcgggatcacttcgctgccgtaggtcttcagatcgtccgccagcgcatcgttaacgataaacccctcttccgccagcttaatcgccggacggatcactttgttcaacggcatggtgccatacttttccagcgcgagggagaaaccggcgacgctgcctggcgtgccggaggccagatgcgaagtcagtgattttttactgtccgggttgccctggtcgtcaaggaacatgtcgcgggtggcctgctctggcgccatttcgcggaaatcgatcgccgtggtcttgccgtctttagtccgcagcatcataaaaccgccgccgccaatattcccggcctgcggatgggtgaccgccagcgcgtagcctaccgctaccgccgcatcgacagcgttaccgccctggcgcaggatatccacgccgacgcgggtcgccagcgcgtccaccgaggccaccatcccctgccgggcgcgtaccgggtggaacacatcttcctctacgccataagagaccggcggcggcggtggcggattggcggcgacggtaaagctgccccccgccagcaacgcagcgatgaccacctgacgccatattgttgtttttatcattgtcttactcctgaaaggtaggtttcattccccgcttaagcctggttgataactcctaaaaaatcattgttatggcagattcgaggtacacttaagtgatcccacgcacgggaggagaaaaccatgaaagcgattctgtttctggcggcgctgatgccgcttggcgtattagcccagccgatcaatattaataacaaccctaaccagccgggttacgtggtccccagccagcagcgcatgcaaaatgagatgaagatccagcaacagcagcagcaaagcatgctaaagcaggatctaaacaatcagacccgctcgcagcagcagcatttgcaaaaccagctgcagactaatcagcagcgcgcggcccagggcggcaatctgaatgcgccgcagcaggtgcggccaaataacaacggtggaatgctgcggcagactaatccgtaaaggtcgtccgccgcaaatccgtcttaaggctggaaattcggcccgataacatcaatggcatcggtgcagatgcagtctacgccccagcgcagcagttcggcggcgcgctggggtttattgaccgtgtacaccagaatgtgcaggccggcctgtttcaggctcgccacccgcgccgcatccagcagtttgtgattgaggtgaatcgacacgcagcccaaccgggtggtcaattcgcgccagtcatcgcgccactcatccagcagcagcccgcgcggcagctcgggcgcggcttcctgcgccgcctccagggcgtcgatttcaaaagaggagagcagcggcgcggtcatgccttgccatagatcgcgcgcggccagcgccaccactctgccggtctgcggccccaacccggtggtcggcttaatttcgatattcgccatcatgccgtgacgacggcagcgctccgccacctgggagagcagcggcagcggctcgcccttaaattcacggctgaaccagctaccggcatcgaccttcagcagatcgtcccacgccagctcgcccgccacgccccagccattgctggtgcgttcgagattatcgtcatgcagcagaaagatctgcccgtccttcgacagcttggcgtcaaattcaatcatcgtgtgcccgtagcgggcgccgacgtcgatagccgccagggtgttctccggcgccagtttaccgccgccgcgatgggcgacgatgcggggataaggccagttactcatgcgcgttgtcctgtttcaccatcaaagaggtgcagatgttccaaaggcagatgcagccatagcgtgctgcctgccgccgggcgctgctgatgcggcagtctgaccaccagcttctgttcgccccagcgcccgtgagcgaggttatcggcacctaaaatttccagggtgtccatcagcagcggaataccaccttgcgcctgcgagcttaagataaaatgctccggacggataccgagcgtcattttacgcccagcgtggcgccggtgctcatgattcgtcggcagctgcatgccgcccgccagctcaaagcgaccgccgtcatcgctgatgcgcccttccagcaggttcatggccgggctgccgataaagctcgccacaaagcggctggctggcttctcatacacttccaccggggtgccgatctgctcggcaacgcctttgttcatcaccatcacccgctgggcgagggtcatcgcctccacctggtcatgggtgacgtacagcgaggtggttttcaggcggcgatgcagctgctgcagttccagacgcatctgcacgcgcagcttggcgtcgaggtttgacaacggttcgtcgaagaggaataccgccgggtcacgcacgatggcgcggcccatcgccacgcgctggcgctggccgccggacagttcccgcgggcggcgcttgagcagaccatccagctcaagaatgcgcgccgcctcctgcacccgctcggcgatcaatcccttacccatgccgcgaatcttcagcccccacgccatgttctcttccacgctcatatgcggataaagggcatagttctggaacaccatcgcgatgccgcgatctttcggctccatctcggtcacccgtttacgatcgatccagatatcgccgctggtcacccgttcaagtcccgcgaccatccgcagcagcgttgatttcccgcagcccgacgggccgaccataacgataaattccccgtccgccacgtccagcgtcagcggttgaattacctgggttttgccatcccagcttttgcttactgcctgtagttttaaaccagccattttatttctcactatcgaccaggccgcgcacaaacgcgcgctgcatggctaaaacgatgacgaccggcgggatcagggtcagcagcatcgccgccatcacctgattccactgggtagtaccttcgccggtggcgatcatgcctttaataccggcgacggcggtgccaagattcacatcctgaataatcagcaacggccacagatactggttccagccgtagataaaggtgatgacgaacagcgcggcgaggttggttttcgacagcggcagcacgatgtcgcgaaagaagcgcatcggcgaagcgccatcgatacgcgccgcttcaatcagctcgtccggcagggtcataaagaactggcggaacaggaaggtagcggtggccgaagccatcaacggcagcgttaacccggcatagctgtcgagcatgttgaggttggcgatcacctccaccgtcgggaaaatacgcacctcgaccggcagcatcagggtgataaagatcatccagaagaacaggttacgcagcggaaagcggaaccagacgatggcgaacgccgaaagcatcgacaccacgattttgccgaccgtaatggcgaacgccatgatgaaactgttgagcatcatcagccagaacggcgcgctgttgacgccgacgccgttcacccagatggtcttcatgttctccagcagatgtccgccgggaagcagcgtcatcggcgtttcaaataccgatttgttatccagcgtcgccgccacgaaggcgacgtacagcgggaataaaatgacggcgatacccaggatcagcatagtgtggctgaaaatcgtcagcccgcgacggttctcaatcattggtaacgcaccttactttcaacgtaacggaactgcaccaccgtcaggataatgacgaggaacatcagcaccaccgactgcgcggcggaagcggatagatcgagcccggcgaaaccttcgcgatagattttgtagatcagagtggtggtcgcctgcaccgggccgccagcggtggcggcatcgatcaccgggaaggtgtcgaagaaggcataaaccaggttgaccaccagcaggaagaaactcaccggcgcaatcagcggcagcgccagcttaaagaagcgacgaatcggcccggcgccgtcgatggcggcggcctcaaccagcgaacgcggaatcgactgcagcgcggcgaaaaagaacaggaagttgtagcttatctgtttccacaccgaggcgaagaccaccagaaacatcgcctggccgctgttctgcgcatggttccagtcgtagcccagctcgccgaggaaatgggtgatcagcccgcgcccggggttaaagaggaagatccacagcaccgccgcgacggcgggggccacggcgtacggcagcagcatcagcgtttgataaaagcggctaccgcgcaccacatagtcgaccagcgcggcgaaaaacagtgaaatgagcaggccgctgacggtcaccagggcgctgaattttatggtggtccagaacgagtccaggtagtacggatcgtggaacagcgcaacgaagttatccaggccgacgaactggctggaaaggccaaagggatcgacgctctgcagcgagtaccacagcgcttcgcctgcgggccagataaagaaaatcaacgtgataatcagctgcggcgcgaccagcacatagggcagccagcgcgagcggaataccggacgggatgatgacattgagattgggttcctgaacaatgccgggtggcggctacgccttacccggcctacatagggcacatcgtaggcccggtaagcgcagcgccaccgggcaagttacagattacgatttagtcgcttgctcgaagcgacgcagcagctggttcccgcgctgcacggcggaatccagcgcctgctgcggggttttcttgccggtccacacgctctccagctcttcatcgacgatggtgcggatttgcggcatgttgcccaggcgcagacctttggtaaacggcaacggcggcttgttcagcatctggcgggtagcgatatcggcgcccgggttcttatcatagaagccctgctgacgcgtcagatcgtaggccgcggtagtgatcggcaggtagccggttttctggtgccactcggcggcgttttccggtttggtcaggaagtcgaggaacttcgccacgccggtgtaggtctctttgtctttgccctgcatcacccacaggctggccccgccgatgatggcgttctgcggcgcgcctttcacgtcggcatcgtaaggcatcatgccgacgccgtagttaaatttggcgtactggcggatatcggccagcgagccggacgaggcagtggtaatggcgcagtcgccgttatagaacttttcggtagactcgtctttacgcccgaagtagctgaaatcgcccttcttgttcatctcttcgagcagcgcgatatgcttcacctgctccggcttgttgaactcaagaaccgcgtcggtaccgtcgaagccgttattcttcgtggccaccggcagaccgtgccaggcgctgaagttttcaatctggatccagccctgccagccgctggcgtagccgcacttcatcccggcggctttcagcttcgcggtataggccgccagatcctgccaggtcttcggcggctgctccggatctaagccggcttttttgaaggcgtctttgttgtagtagagcaccggggtagagctgttaaacggctgggagagcagatggccggttttcgaatcggtgtaatacccggccaccgtcggtacgaactgcgattcatcaaacttgatgcccgcctcgctaaacacctggtagaccggcttaatggcttttgacgccatcatggtggcggtgccgacttcatacacctgaaggatagccggcgcgttgccggtacggaaggcggcgataccggcgctcaggctctgctcgtagttgcctttgtataccggaacgattttgtaatcaggattggccgcgttaaagcgttgcgccagagaatccacttctttacccagctcgccttccattgagtgccagaatgggatggtggtaaccgccagggcctgaccggcaaaagccaggctcagcgccagtcctaaagctgtatgtcgtaacgatatcatcggttatctctcttgttgtgccggatgcgcgatttcacgcgttttatgctcgcggggtaacatgacatgttcgaattacagaaaaataacttttttattacaaaaaaaagatagtaacgggtcagagagatgacaagccgatgaaaggacgggggaagtaaagtgggagctgagacacggataatattcgtgcggtcggctcccggggtcggcgcaagcgcctcgcccgggctacaaaccggcgaagccgccgggttgcaacgagttaaccgtcatccacgcaaacgcgcgacaatctgttccagggtaagttgccctgctgctgcctcgacggtcatgccgacgaagtctggattcgctggcaatataattccatttcgctttaaaaaaagcagggtgataaacagtgccgtacgcttattaccatcattaaatatatgaccgcgagaaatcgccagcagatgcatcgcagcgagtcgccacacgtctgtcacaccttcatattcaattttgtttagcaccctatacattatcgcttcggcacgccccggatcgggcataccggcaacgccaggcgtgacgcggagcagcctgtcgtgaaactgtattatctcttccgctgagataatctgcagcgtcatttatccgcaagctccctgatctcatcaccatgaaccgccatgatagccgcgaactcatcatccattctggccgcctggtagcgttcaaactcttctgcactaatgatgactgcagatttatgcccacgacgggtaatggtcacaggtacacctgtcactgcgctttccagcacatcggccagattttgccgggcttcgctatagttaaccgttctcataaaaacctccaaagctgtactcttttattgtacaacatacatgtacaaaaaaagagccaacaggctcttttaaatgtattcgtgcgatcggctcccggggtcggcgcaagcgcctcgtccgggctacaaaccggcgaagtgaacgacgccgggttgcgatgaattaaccgccgagataggcgctgcgcaccgcctcgttggccaacagcgcgtcgccagtgtcctccagcaccacgtggccgttctccagcacatagccgcggtcggccagcttcagcgcctggttggcgttctgctcaaccaggaagatcgtcatcccttgctcgcgcagctgctcgatggtgtcgaaaatctgctgaatgataatcggcgccagccccagcgacggttcatccagcagcagcaggcgcggttggctcatcagggcgcgaccgatcgccagcatctgctgctcgccgccggacatggtgccggcgcgctgaatacggcgttcatgcagacgcgggaacagctcatacacccatttgatgcgggtctggaactgatcgcggtcggcaaaaaaaccgcccatcgccaggttctcttccacagtcatacgcgaaaagacgcgccgcccttccggaacgattgccaccgcctcgcgcatgatcttcgcggtttgccagtcggtaatatccttaccgtcaaagacaatgcgcccgctggaggcgcgcgggtcgccgcacagcgtgccgagcagggtggttttccccgcgccgttggcgccgataagcgtgacgatctcgccctgtttgatatgcaggctgacgttgtgcagtgcctgaatcttgccgtagtgggcgctgacgttgtcaaaagttaacatcgcgttttccatcttatgcctcaccaaggtatgcgcggatcacgtccgggttattacgaatctcttccggcgtcccgttggccagcggtgttccctggttcacgacgtagatgcgatcggaaatgcccatcaccagcttcatatcgtgttcgataagcaggatggtggtgttgtgatggttacgcagctcggcgataagctcgtccagctctttggtctctttcgggttcagccccgccgccggttcatcgagcatcagaatttccggctgggtcaccatgcagcgggcaatctccagccgacgctggtcgccgtaggccaggttgctggcctgacggttggcatgctccagcaggccgatacgctccagccaggtggcggccctgtccagcgcttcgctctgcgcccgacggaaggccggcgttttcagcaggccggagaagagcccggttttcagctgctgatgctgcgccaccagcaggttttcaatcaccgtcatttcgcggaacaggcgcacgtgctggaaggtccgcaccacgcccatccgcgcaatctgctgacccggcagcccttccaggtgctggtcgcgcagcagaatagtgccgccggtgggcttgtaaaaaccggtcaggcagttaaagacggtggtcttcccggcgccgttggggccgatcagcgagacgatctcgcgctctctgagctccagcgacacattgttgacggccagcagaccgccgaaacgcatcatcaggccgctaacggataataatggctgactcatgcctgctctcctttcgcctgaccgtttttcagcttcaactgcacgcgcgtcattggcagaagcccctgcggacgccagatcatcatcagcaccatcaggccgccgagcattaacatgctgtattcgttgaagtcacgcatcaactcgcgcgagaccaccagcagaatagccgcgaggatcaccgcgaactgcgagcccatcccgcccagcacgacgatcgccagcacaaaggctgactcggcgaaggtaaaggattccgggctgacgaagccctggcgcgcggcgaacagcgtgccggcgaagccagcaaacgcggcgctgatggtaaaggcggtcagcttgatgcgcgtcgggctcaggcccagcgaacgacaggcgatctcatcttcacgcagcgcttcccacgcccggcccagcggcattcgcagcaggcggttgatgacgaacaggctgagcactaccagcagcaacgccaccaggtagaggaaaatcacccggtcggagggatcgtatttgacgccgaagaagttgctgaaggtatcccagccgccttcgcgggcgctgcggctaaattcgaggccaaagaaggtcggtttcgggatctggctgatgccgttcggcccgccggtgatctcggtattgttgagcagcagaatgcgcacgatctcgccgaagcctaaggtcacaatcgccaggtagtcgccgcgcaaacgcagcaccgggaagcccagcaggaaaccggccgccgcggagaccaggccggccagcgggagacaggtccagaatccaagaccgtaatagtggttcagcagcgcaaaggtatacgcgccgatggcatagaacccaccgtagcccagcaccagcaggccggaaaggccgaccaccacgttcaacccgaggccgaggatgatatagatcatcgtcagggtggcgatatccaccgtgccgcgcgacaccataaacggccaggccacggcaatcaccagcagggcgatcaggaacagcttctgcttcaccgtcgacccgtcaatcgccggcataataaacttcggcccggagacgttcttaaccgctttctggaacagcggccgcagcagctggaagaaaaagaccaccgcggtaccgatgaagatccactgccagcgaatatcggcggcggtatcgaccaccagtttggtgccgttcagctccagctgcacgcccataaagacgcccgccagaatgaagaacatcacggcagagagcagcgccattgcaatttgcatcggtttcatactttttccacctccgggcggcccagaatgccggtcggcatcactaacagcaccagaatcagcagcgcgaaggaaacgacgtccttatattcggtgctgagataggcggaagagagcgcctcggcaatacccaggatcaggccgccgatcatcgcgccagggatactgccgatcccgccgagcacggcggcggtgaacgccttcatcccggccataaagccgatgtaggggttaatcacgccgtagaactgccccagcagcacgccggccaccgccgccatcgctgcgccgatgacaaaggtcagggcaatgacgcggtcggtgttaatcccgagcaggctggccattttcagatcttccgcgcaggcgcggcaggcgcgccccatccgcgagtagcgaataaacagcgtcagggccagcatggcgataaaggtcaccacccagatcaccagttgcatggtggtgatcgtcgcggagaagctgtcgctgtggccgacgacccactggccgttaaacaagctcggcagcgccacgtcgcgggagccctgggtcaggctgacgtagttctgcaggaagatagacatcccgatggcggagatcagcgcaatcaggcgcttggagttacgcaccggccgataggccacgcgctcaatgctccagccgtaggcgctggcaatcacaatggcgcccacgaatccggcggcgaccagcagccagctagtgtcaatgcccatcatgatcagcgcggcgatgatcatgaaggagacatagctgccaatcatatagacctcgccgtgggcgaagttgatcatgccgataatgccgtacaccatcgtatagccgatggcgatcagcgcataggtactgcccagcgtgacgccgttaaacatctgctgcagaaaatagagaaactgctcggacataaggtaacctttttcaaaccgcccgcggatcgcgggcggagggataactcgtcttcagcgcttatttcgccgcgctcgaagagccgtcggcgtgccactggaagacaccaaactcaaatcccttcagatcgcctttttcatcccaggtcagcggcccaatcacggttttcgccccgtgcgctttcaaatctttgattaaatccagcggctgctggctgccggttctgtccatcgcctgcgccagcgactgcacggcggcataggtgatccagacgtacggtccgctcggatctttcttctccgctttcagcgcgttgacgatggcgctgttggcagggtcctgatcgtagcgttttggcattgtcaccagcatgccttccgccgcggcgcccgcgatattggacagcgaggcgttgccgaccccttccggccccataaacacggttttcaacccgacggagcgcgcctggcgcagcatctggcccatttccgggtagtagccgccgtagtagacgaagtcgatgttctctttcttcaggcgcgccagcagggcggagaaatctttttcccccgcggtgatgccatcgaagaagacgatgttggccccggctttcttcaggttgtcctgcaccgaacgcgccagcccttcgccgtactgctgcttgtcatgaatgatggcgatacgctgcggtttgactttctcgacgatatatttcgccgcggtcggcccctgcgaggagtcgaggccggcggtacgcatgatgtactggtatccgcgctgggtcagctccggattggtcgccccgggggagatcatcaggatgccttcatcctcatagatgtcggaagccggctgggtggaagaggagcacaggtggccgataacgtactgaatgccgtcgttgacgattttgttggccaccgcgaccgcttgcttcggatcgcaggcgtcgtcatattcgacggccaccagcttgtcgcccttaatgccgccgctggcgttgatgtctttaatcgcctgacgcgcgccattgaactccatgtcgccccactgggccactggacccgacatcgcgccgaccacggcgaccttaatatccttggccatcgccgcgtgcgacatcgctaatgcgacaatgcccgcgacgatggttttcgcgttccttttcatgctgcagaaccccgttcgtgatgtggtgtaaatgttttgtatttttatggttaaaaagcattctgtgcttttattaaacaacgccatttttaccattgagtttaatggtttagcgcagtttttcactaaaaaacagattaaaacctctatttttcagtcgattaagcaaagataatattctgtattttggtgaagataaacaaaaaaaagtccatcctgtagcataaaataacgatacataaggcggaataaaacgctgcacattaggttaaaattctgcttatttttcgatccatgacggattgcgctaccctgacaacgccaggaaaacgaatcccctgatgtacgcgcaaaaaacagcgctccgccagacagcaattttgggtacactggcgcctctgttttgcactggatttgccgcccatgaaactgaccattatccgtttacagcacttcagcgatcaggatcgcattgatctggggaaaatctggccgtcgcaggatctgtcgacgctgacccttgatgaaaaccatcgtctctacgccgcccactttaacgagcgcctgctgggcgccgtgcgcgttaccctgcgcggcgtcgaaggtgagctcagcgatctgtgcgtgcgtgaagtgacccgccgccgcggcgtcggacaatacttagtggaagagacattgcgtgataacccggcgatcaatagctggcgcgtcgccgaccatggggtggaggaccgcggcgtgatggcggcctttatgcaggcgctcggctttagcgcccagcagaatggttgggaaaagcattaagccgtagccccaataagcggagcatgaccaaggaagaacccggcggcgcttcgcttagccgggctacctggcgactgtagccccggtaagcgcagcgcgaccggggtcagacaacgcatttgcagtgggaaaggcgccccccatttaacccagcatttcgcgttgtaaaaaggcgtcaagacccgaaatccccgggagcttacatcagtaagtgaccggggttgagggccgcagacaacgcatttgcagtgggaaaggcaccccccatttaacccagcatttcgcgttgcaaaaaggcgtcaagagccgaaatccccgggagcttacatcagtaagtgaccggggttgagggccgcagacaacgcatttgcagcgtgaaagtcccccacccatttatcccagcatttcgcgttgcataaatgcgtcaagacccgacatccccgggagcttacatcagtaagtgaccggggttgagggccgcagacaacgcatttgcagcgtgaaaggcgcccctcatttaacccagcatttcgcgttgcaaaaaggcgtcaagacccgaaatccccgggagcttacatcagtaagtgatcgggattgagggccgcaaacaacgcatcggcagcgtgaaaggcgccccccatttaacccagcatttcgcgttgcataaatgcgtcaagacccgacatccccgggagcttacatcagtaagtgaccggggttgagggccgcagacaacgcatttgcagtgggaaaggcgccccccatttaacccagcatttcgcgttgtaaaaaggcgtcaagacccgaaatccccgggagcttacatcagtaagtgaccggggttgagggccgcagacaacgcatttgcagtgggaaaggcgccccccatttaacccagcatttcgcgttgcaaaaaggcgtcaagacccgaagtccccgggagcttacatcagtaagtgaccggggttgagggccgcagacaacgcatttgcagcgtgaaaggcgccggttaaattatttggcgtcggtcgccgtaccgttcgcatgccaggtaaagaccccgaactcaaagcctttcaggtcgcctttctgatcccacgacagcgggcccatcacggtgtctactgtcgcgcctttcaggtatttagcgatttccgccggatcgtcagactgattcaggcctgcctgcagcgactgcagcgccgcgtaggtggtccacacgaaggcgccgctcggatcctgtttcttcgccttgatcgcatccacgatcggtttgttcgccggcacctggtcgtagttcttcggcttggttaccagcaggccttccgccgactcgccggcgatgttagacagggagacgttcgctacgccttccgggcccataaactgggttttcagaccggcggcgcgcgcctgacgcaggatctggcccatttccgggtgatagccgccgtagtagacgaaatcgatattctctttcttcaggcgcgccaccagggtggagaaatctttctcaccggcggtgatcccgtcgaagaagaccacgttcgccccgccttttttcaggccatcctgcaccgcacgggccaaaccttcgccgtactgctgtttgtcatgtaccactgcgatacgctgcggcttcactttgtcgagaatgtatttcgccgcggttggcccctgatcggagtccagaccggtggtgcgcaggatcagcttatagccgcgcgccgtcagctccggagcagtcgctgccggggtaatcatcagaatgccttcgtcttcatagatatcagacgccggctgagtggaagaggaacacaggtgaccaataacgtatttgatgccgtcgttgaccactttgttggctaccgctaccgcctgtttcgggtcgcaagcgtcatcatatttgacgatctgcagcttattgcccttgatgccgcccttagcgttgatatccgctaccgcctgctctgcgccggtaaactcctggtcgccgtactgggccaccgggccggacatcgccccgactaccgcgattttgatatcttccgccagcgccgcgctgctcataactaaggcaatacatcctgccagtaacgctttacccttcatattcatcctgaggctccccattattatggtttttgcatttgttgtgatgttgtttattagcgcattattttgtttataccgataggaaaagcatatgatagctaatcaaccggggactgcccgcgcttttgcagcacactatgctaaacataccgtcattctgaggaatttgaaacgactaaattgcgggctatgtaacagataagtgacaaataaaaaaaccgcgccagcatgaaccggacgcggtgcaaaacagagcctgattaccagcctgcgggtaggtagcccaccgcggatgctatcgcgtaggcggcgctgcaaagatacaacaacacaatgaagcattggataagcggatgggtcatccaggccggacaggtccagcccggggtcagatcgccacgctggcgggcgcccttgagcatcaggatcggcataatcgataaaatgacgccgctgaacaccccggcaaaatagagcgcgttgacgaaggagaccatgccgctataggccagtacgaacggcgggatcgccaccaccagcagcaccatcaggcgccgggcgggctgttcgtcattccccaggcggaactgatcgaagatattggtcaggaagctgccgcccagtccccagtaggaggtcagcatcgcgcacagcgcaaacagattggctgagaagaaggcccattcgccaagcgcccgcccccaggagatggtggccacatccgagatattgtcgagaccgttaagcgagatcaccgacaacggcaccagcgccagcagggtaaaggtcagcgccataccgaccatgatggctttaggcaatttttccggtttgtcggcgaagccccgcgccatctccggcacgatatactgtgccgagaagcagaatgccacgacgttgaagaccggaaccatatacagccagttgccgtcgagcagatagccgacgcgggtggtatctttcaacagcgtggcaatcaccagcaccgagatcatcaccaccatgccgatgctgataaatttctcaccgcggccgatcgccttcagccccaggtagagtacccctgccgccggaacgaaaaacagcacgctgcccagcgccggcgagatgccaaacagggagtgcagcagcttaccgctgccggtcatatacgccgtcaatgccccgacgctattgacgcagacggagagaaacatcatcagcgcgccaaagccgccgacgtagcgcttcgataatccactgagctgcagatgtttacgggtgcgcagcgtggattccgcgacatagagcatagtcaccgtcgtcaggctgcccaccagcaccagccagaacagcagcggtaagaagcccgctttgctcgacgcataggcgatagagaggacgcccgcgccaatattggtaccgacaatcatcgataccccttcgacgaagctcagagattttgcagggacagccgtacgttcccggccggtgaggacgggagaaaaggtggagttttcagacataatacttaatgagatggtcactccctccttcccagtactatgctgaggacaggctttcattcggagaaccatcatggaaaacattgcgcttattggtatcgatctgggtaagaactctttccatattcattgtcaggatcatcgtgggaaggccgtttaccgtaaaaaattcacccgaccaaagctaatcgaatttctggcgacatgcccggcaacaaccatcgcgatggaagcctgtggcggttctcactttatggcacgcaagctggaagagttagggcattttccaaagctgatatcaccgcaatttgtccgcccattcgttaaaagcaacaaaaatgacttcgttgatgctgaagctatctgtgaagcagcatcacgtccatctatgcgtttcgtgcagcccagaaccgaatctcagcaggcaatgcgagctctgcatcgtgtccgtgaatccctggttcaggataaggtgaaaacaactaatcagatgcatgcttttctgctggaatttggtatcagcgttccgcgaggtgctgccgttattagtcgactgagtacccttcttgaggacagtagtttgcctctttatctcagccagttactgctgaaattacaacagcattatcactatcttgttgagcagattaaagatctggaatctcagttgaaacgaaagttggacgaagatgaggttggacagcgcttgctgagtattccctgcgttggaacgctgactgccagtactatttcaactgagattggcgacgggaagcagtacgccagcagccgtgactttgcggcggcaacagggctggtaccccgacagtacagcacgggaggtcggacgacattgttagggattagcaagcggggcaacaaaaagatccgaactttgttggttcagtgtgccagggtattcatacaaaaactggaacaccagtctggcaagttggccgactgggtcagggagttgttgtgtcggaaaagcaactttgtcgtcacctgtgctctggcaaacaagctggccagaatagcctgggcactgacggcgcgacagcaaacttacgaagcataaaggcagaaatacaccagtttaaacaatcattcatctggttttgcgaatactgatattgatgatactaacggcccaccggcctgttgaggaacctgtaaaacggaaaggctcattgaagccgtatattttctggaggttcatcaggcgcggaactcatcgaggcgcgggaataaaatcccattcagacgccggatagattcaagcaagccaacttgtcgtcaaaatcggtgttgcaaaaacgggagtgaccatagattccgttttactccggcggttttcaccgccggaaaaaaggtgatatcagagtgataaaccactcacgctgagcataaacagccggctgcggcgtcctgtttctgttcggcttccctgccgccgcagcccgccggggagacgttagctcttcagtacgcgcgccagaatatccagcgctttcgagaactgggcgtcggggatagtcaacggatacaggaagcggatcacgttgccgtagacgccacagctcagcagcagcaggccgttctcctgcgctttctgttgcacaaggcgggtgaattccggcgacggttcgcctgtttgcggatcgttaaactccaccgccaccatcgacccccggccgcggacatctacgatcgccgggcaggtagcgcgcgcctggttgagcacttcctgcagatggctacccagctgttcagcgcgctgacacagctgctcttcggcaatcacatccagcaccgcgtgcgccgcggccaccgccagcgggttaccggcataggttccgcccagcccgcctggggctggcgcatccatcacctcggcgcggccgacaacgcccgacagcgggaaaccgccggcgaggcttttcgccatcgtcatcagatccggtttcacctcatagtgctgcatagcgaacagcttgccggtgcgggcgaaaccggtctgcacttcatcggcgatcagcagaatgccgtgggtatcgcacaggtcgcgcagcgcctgcataaaatcggccggcgcgacgttaaagccgccttccccctggatcggctcgagaatgatggccgctacctggtccggcgcaatatccgctttgaaaatgcgctccaggcttttcagcgcatccgcggtggtcacgccatgcgccgcattggggtaaacgccgtgatacaccgagcccgggaatggcccgaagccgattttgtagggcgcgaccttaccggtgagggccatggtcataaaggtacggccgtggaaaccgccgccgaaggtaatcagccccggacgaccggtgtaagcgcgggcgattttcaccgcgttctcgaccgcttccgcgccggtggtgaagaaagccgtttttgccggcccgtcaattggcgccagatcgttgatacgctccgccagcgaaacatagctttcgtacggcacaatctgataggcggtgtgggtgaacgcctgcagctggtcggcaaccgcggcgaccactttcggatggcggtgaccggtatttaacacggcgatcccggcggcgaaatcgatcacctcattgccttcgatatcccacagcgtggcgttttccgccttctcgacaaagtagttacacattacgcctacgccgcgcggcgtcgcctgctggcgacgttgattcagttctgagcttttcacctgcgaatctcctgtcgtgtatgtcacgttatcgcaacaaattagaaacgatgtcgtttatttacacaggagttggccctataatcgagtaccaattttgaatatctgagggatccaattgcgttcgctggtgggtgacctggtgctggtccgtctgcaggaagagcgggatcctcttctgcacaaacgcttatataacgcgctgcgccgcgcgatcctcgacggttcgctggcaccgcaaagccgtctgccgccgtcgcgggacctggcgggcgaacttggcgtatcaagaaacaccatattaacaacttatgaacaattgctggcggaaggatatgtggtttcccgtcggggaagcggaacattcgttgcccaaaccgcccctgagagctcattgacggctaaaggtcagcaagaaaacagcagtatcgcagcaccgacggcgcatctttcacgccgaggccaacatctgctcggccaggtcagcgccagcccgcgccagtggggagcgtttatacccggcgtgccggacgttaacgcctttccccacccgctgttcagtaagatccaggcccgcatcagccgtcggcccaaaccggagcggctcagctatagctgcaacggtggcaccccggaactgcagcaggcgctggtggattatctgcgcgtgtcgcgcggcgtccactgtcagtcagatcaaattcttatcaccgaggggatccaccaggcgatcgatctggtcacccgcatgctgtgtgataacggcgatctggcgtgggtggaagagccttcctactgggggatccgccacgtgctggcgatgaacgacgttcgggcagagcccctgaccgtcgatgccaacggcctgtgcccgccggagacggttgacgatgcgccgaggctgatcttcgttacgccttcccaccagtatccgctgggcgcggtgatgagccttgagcgccgccagcgcctgctggcactcgcccgtcagcaggggagctggatcgtcgaagatgattatgacagcgagtttcgcttttccggtcagccgatccccgccctgcagggtctggtcgccgacgccccggtggtctatatcggcaccttcagcaagacgctctatcccggcctgcgcctgggctacgtggtgatcccgcggccgctggtcagcgacctgaagcacgcccatgccgagctttaccgcggcggccattcgctgatccagatggcgctggcggagtttattaccgccggccactattcggcccatatccgccgtatgcggctgctatacagccgtcgccgcgcctttttaactgagcttatccagcggcactgtatgccgtacgccctgtctgacttcagcgataatgccgggctgcatttgatcctcaatttgcccgcagaggctgacgatgtggcgatcgccagagaggccaatgcgcggcacattctggtgcggccgctgtcgcgctactacctgacggcggcgcgcaagaaaggattactgatgggattcgccagccagcccgaagagcagatggcgtcggcgttcagcgtcttactcggctgcctgcagacgcactgcccgcagatgctcctgctccgggaggacgcagaaaaacaaaacgccccaacctgaggcggggcgttatcggggagcctgatatcaggtatcaggcaggcgtggcgtatcaggcttcgatagcggcacgcagttttttcatggcgttcttttccagctgacgcacgcgctctgcggagacgccgtagcggtcggccagttcctgcagcgtggacttgttatcttcgtccagccagcgggcgcggatgatgtcctggctacgctcgtccaggccctgcatcgcgtcagtcagcttattcgccgcctgctcttcccagttatcgtcttcgatgccgtcggcaaagttagacgttttgtcctgcagatacaggaccggcgccatcggctggctgtcggactcatcgtcggacgacatgtcgaaggtcatgtcctgggccgccatacgggattccatctcacggacgtctttgctcgacacgcccagctcacgggccaccatttccacttcatcctggttgaaccaacccaaacgctgtttggttttacgcaggttaaagaacagcttacgctgtgctttggtggtagcgaccttcacaatacgccagttgcgcagcacgtattcgtgaatttcggctttaatccagtgcacggcgaaggagaccaggcgcacacccacttccgggttgaagcgacgcacggctttcatcaggccgatattgccttcctggatcagatccgcctgcggcaggccatagcccgagtagttacgagcaatgtgaacaacaaagcgcaggtgagacagaatcagctttttcgctgcttccagatcgccctggtaatgcagcttttcagcaagctcccgctcttcatcagccgacagcatcggccaagtgttagcggcccggatgtacgattccaggttaccaacgggggctaaagctaaagtttgcatttctttggtcattcaaatcctctcaattgatatcttctgacgcgttcttgtccccatcaggcaacaagcatgccagcattcatgagcaacgagaatatcactcacattagtatcagacagtgattttatccacaagttccatgcaacggtgtgaataaattacgcacaaaatgtgacaccacgatgaaaaagtgagggcaggaaaaggggaacaagcttgcggtatctttccctgcgaacaggaactcattgcagcagggaaagattatatcacgcttttattaatcgggagtaaagtgacgtaaatgttgcactgtcgccagccaggcggctacccacccgatcatcgagcagacgatcaacatcaacagacactcgtcgaagcctaagccgctcagctcaaactgggtgccgaagactttcgccacttcggtcaccgccgacgagaggcgcattaccagaatctccgacaggatcagcgataaaaacgcgccggaaaagcccagcatcgctccgccgtagaggaacggacgcaggataaagccgtcggtggcgccgataagcttctgaacgttaatggtatcgcggcgggcgaagatgctcaggcgcacgctgttgccgatcaccaggaacaccgccgccaccatcagcacgccgatcatcgccgacacgcgtcctaccagcccggtgagcgaggagagacgggcaaaccagctgtcgtccatccgcacttcatcgacaccctggatccgcgatacccgatcgcgcagggtattcagcgcctcggtgctctggaaatccagcttcggcaccacgatggcgaccgccggcagcgggttctcctccagcatatccagggcgccgccaaagcctgaccagttacggaactcccccagcgcctcgtcacgggacaaatagtttaccttgtcgacgccctgctccgcctgcagctggcccaccacccgcgccgcggcatcgtcatccagcgttttctccagataaacggtgatctgcggcgagggataatactgggacgcagcgctgctgacgtttttgtagaccatgtagcagacgcttggcagggtcaacgaaatggcgatgaccatgaccgtcaggaaggtcgccagcggcgtgctttttagatcctgcagcgcgccgtgccaggcatagcgcacctgctcgttgaatacgttgctcttacgcgaggccgggttaggcgccgctttcggccgttttggcgcattgcgcccgccaccgccgccgcccgcggcgttgcgcaggcgatcgaacttgctgccgaactggcgaatctggttcattgcgtcgcgcttattcaccccgaatgcctccatgcagatggccgtcgctaagcgtcagcacgcggtacggacgactggagataagccccagatcgtgcgtggccatcagtaccgtcaccccgacgcggttaaactcttcaaacagacgtaaaatcccctccgagagcgcctcgtcgaggttgccggtcggttcatccgccagcagcaccgccggcttgttgaccaccgcgcgagcgattcccacgcgctgctgttcaccgccggagagctgaatgggaaaattcttcgctttgtccagcaggccaaccttgtccagcgccgccgagacgcgacgacgaatatcatcgccgctggcgccggcgataatcagcgggatcgctacgttgtcatacacggtacgatccatcagcaaatggtggtcctggaaaatcataccgatctggcggcgcaggaacggcacctcacggctcttcagacggctgatttcatgaccgctgaagaagattttcccggcgctgggccgttcgataccacagataagcttcagcagggtactcttccctgcgccggaatggccggtcagaaacgccatctcgcccggctgcaggtggaaggtcaccccctgcagcgcttgtctcccaccgagataggctttgctgacttgttcaaagcgaatcattcttaatcctctcgggcaaaaagtgcctcaataaagtcgcccgcattaaacggacgcagatcctcaatacgctcgccgacgccaatatagcgaatcggaatgccgaactgatcggccaccgagaagatcacgccgcctttggcggtgccgtccagcttggtcaaagtgatcccggtcaaacctaccgcctcatggaacagtttggcctggctaatagcattctgcccggtgctggcgtcaatggttaacatcacctcgtgcggcgcgtcgacgtccagctttttcattacccggacaatcttcttcagctcttccatcaggtgcgatttattttgcaaacgcccggcggtatcggcaatcagtacgtcaacatggcgcgccttcgccgcctgaatggcgtcgaaaatcaccgaggcggagtcggcgccggtgtgctgggcgatcaccgggatattattacgctggccccagacctgcagctgttccaccgccgccgcacggaaggtatcccccgccgccagcatcaccgacttaccctgctgttcaaactgacgcgccagcttgccgatggtagtggttttccccaccccgttcacaccgaccatcagaataacaaatggcgttttgccttcaacgttcagcggctcgtctactttggcgagaatctcgcccatctcttctttcagcaggccgtacagcgcttccgcatcgcgcagctgcttacggctggcgccttccgtcaggttggtaatgatcttgcgggtggtttccaccccgacgtcggcgatcagcagctgttcttccagctcttcaaacagatcatcgtcgatcttcttaccgcggaacaggctgataaatccggaaccgagattttgcttcgttttcagcaggctacgtttgaggcgggcgaagaaaccttcttttgtcggtttttcctgctcctgagccagcgcttcaagcggcgcctcgtcctcgggcgccggcaccactaccgccgcctcttctgccgcttcggccgccagcgcctgcgcttccagctcttcatcgcttaacggcgcgtcctcttcgggcgcttctgtctcctgcggctggacaacgatgccttccacaggctgctctgctacggcttccgccaccaccggttcggcgataacctcttccgccagcggctcaaccaccgcaggctgttcaggcggttcgctgaccgcgggctccggttcaacaacaggcgtttcttcggtcagaacaggcgtttccacccactcttcttcctgcgcgctggcaggctccgcgaggtgcgctttttcgctttcgaccaccgtctcggtcacttcgacgacgtcttcggcaaacgcctccgggtctgctttcggcgcgctcggctcagcaggggtttcaaccgccggtatctcttcggcaaccgcttgctgttcttctactttttgctcagtctcggtttcctgtgcctgttctttctgtccaaagcccagccaggaaaagaagccacgttttttctcttttgccatttgcgaccacactcctcgctgtttattcatggcgcagcttcatcagaagctgaaaaaatgatgaaattagttggatagtctatcacttaacttaactcgcagcaccgcccccggattaaggtttcgtcaaccgccgtcgatcgctagaatagcaggctggaagttgagacttgagcagagagatgaaaaaaccaaaccacgcgggcagcggccagatccgcatcatcggcgggcaatggcgcggccgtaaattaccggtgccggagagcccgggcctgcggccgaccaccgaccgggttcgcgaaaccctttttaactggctggcgccgtccattgttgacgcgcactgcctcgattgctttgccggcagcggcgcgctggggctggaagcgctgtcccgctatgcggccagcaccacgctgctggagatggagcgcggcgtagcccagcagctgcaaaaaaatctcgccaccctgaaagcgaatcgcggcaaggtgatcaccaccaacaccctcagcttcctgagccagccggggaccccgcaccagatcgtgttcgtcgacccgccgttccgtcaggggctgctggaggagacgctacgtctgctggagacacaaggctggctggccgatgaggccctggtgtacgtcgaaagcgaagtcgaaaacggcttaccgccggtgccggctaactggcaattgtatcgtgaaaaagtggccggacaggtcgcctaccgtctttaccaacgtgaggcccaaggagagcaccatgctgattaatttaggccgcctgctgatgctgtgcgtctgggcctttctgttattgaatctgtttcagcccttcccgaagccgctgaatatctttgtcaacgtcgcgctgattttcatgatcctgatgcacggtctgcagctgacgctgctcaaggcgacgcagccgaaagaggcgccgccgctgagccgctttgagcaaatccgcatttttattttcggcgtgtttgagctcgtggcctggcagaaaaaactgaaggcgacgctgaaaaaatagtcctgaaaagggctcagggatcgggcgtaaacgccacgaacgctgtgcccttataactcaacatcccacgatcgccgacgctcagcgcgtgatattgcggcgcgtcaaggcgaaacaccacctccagcccaccgttttcggggcgaaagctcgcttcatagcgcatctcactgcctgcaggcgtcaccgtctgctgccgcgagcgccgatcgttaatcactttttcccgtttattgctgacgataacccgcttttgtagcaacggcgcggcgtcattcgcctgtttctcacggcgctgctggacatagcgaaacgaagccgccaccacaatcaccgcgacgaccagaacaaaaaagaggggcattttactcattagggttacccataaaaaatatcaggaatcagcatactgcgtcgggaataacattgtcatctgctacgccaaaccactacactgagtagtagcatcacgcatccgtaactttctttatgataacagatacagggacttactatgctttggtcatttattgctgtctgtttctccgcatggctttatgtcgatgcatcctatcgtgggccggcatggcgacgctgggtttttaaacctgtcaccctgattctgttgctgttactggcctggcaggcgccgatgttcaatgccatcagctatctggtgctggctggcctgtgcgcctcgctgctcggcgacgccctgaccctgctgccgcgccagcgggtgatgtacgcggtgggcgctttcttcctgtcacatctgctgtataccatctggttcgccagccagctgacgctgtcgttcttctggccgctgccgctggtgctgctggtattcggcgccctactaatggcggtgatctggagtcggctggaagagatgaaaatgccggtgctgacctttatcggaatgacgctggtaatggtctggctggccggcgagctgtggtttgcccgccccaccaacaccgcgctgtccggtttcgccggcgcagccctgctgctgctgagcaatgccgtgtggctggtgagccactatcgtcgccgcttccgcgccgataacgccatcgccgccgcgttctactttgccggccacttcctgatcgtgcgcgcgctgtacctgtaatttagttcttgactctggagtcgactccagagtgtatcctacggctaatgagaaaattatcatttcccggagggtgccatgtcgactccagacgcgcaggataaaaaagttccacaattctcgtctttcaccatgcggccagcgaccgccccggcggagagctgctgtacagatcacgcctgcgccacagagtccgcccctgccgccgaagcgcttagcgacgcccgctatagctggcaagttgatggcatggactgcgccgcctgcgcccgcaaggtggaaaccgcggtccgtcaggtgcccggggtcagtcaggtccaggtgctgttcgccacagaaaagctgctggttcacgccgagggcgatgtccgcgctcaggttgagaacgcggtccgccaggcggggtatacgctgcgcgatgccgatgctcccgcagcagagcaaacccgagggtcgctgctgcgcgacaatctgccgttactgacgctggttatcatgatggccttgagctgggggctggagcaggccaaccaccctgccggtcagttggcctttattgccaccaccctggttggcctgtggccggttgcccgccaggcgctgcgcctgatcaagagcgggagctggttcgccattgaaacgctgatgagcgtcgccgccatcggggcgctgtttatcggcgccaccgcggaggcggcgatggtcctgctgctattcctgatcggcgagcgtctcgaaggctgggccgccagccgcgcacggcagggggtgagcgcgctgatggcgctgaagcccgacaccgccatccgtctgcgcaacggcgtgcgggaaaccgtcgcccagcgcgacctgcgtcccggagatgtgattgaagtggctgccggcgggcgtctgccggcggatggccagctgctgtcgccgtttgccagctttgatgaaagcgccctgaccggcgagtcggtgccggtggaacgtcaggccggggaacgggtagcggcgggcgccaccagcgtcgaccgcctggtgcagcttaccgtgatatccgaaccaggcgacagcgccatcgaccgcatcctgaagctgattgaagaggctgaggagcgtcgggcgccgatcgagcgcttcatcgaccgcttcagccggatctacaccccggccattatggtggtggccttgttggtcgctattgtcccgccgctgttcttcgccagcgcctggctgccgtggatttataaagggctgacgctgctgctgatcggctgtccgtgcgcgctggtcatctccacgccggcggccatcacctccggcctggcggtcgccgcccgccgcggggcgctaatcaaaggcggcgcggcgctggagcagctgggccaggtgcgccaggtggcgttcgataaaaccggcaccctgaccgtcggccagccgcaggtgacttcggttattgccacggccgaagttgacgacaacgcgctgctggcgctggcggcggcggtggagcaaggctccagccacccgctggcgcaggctatcgtccgtgaagcgcagcggcgtcagctgagcattccgcttgccagcggccagcgggcgctggcgggctctggtatcgaagccgaagtcaacggcagccgcatcctgatctgcgccgccagcaaagccgccccggcagagcatgaggcgcagatccagcagctggaaagcgccgggcaaacggtagtgctggtgatgcgcggcgagacgctgctcggcattctggcgctgcgcgataccctgcgcgacgacgcgcgtcaggcggtggatgctttgcatcagttgggcgttcagggggtgatccttaccggggataacccgcgcgccgcggcggccatcgccagcgaactggggctggaattccgcgccggtctgctaccggcggacaaggtcaacgcggtgatagcgctgaatgccgacgcgccgctggcgatggtcggggacggtatcaacgacgccccggcgatgaaagcggccaccatcggcatcgccatgggcagcggaaccgacgtggcgctggagacggccgacgccgcgctgacccataaccgtctgaccggcctggcgcagatgatttccctggcgcgcgccacccacgccaatatccgccagaacatcgcgattgccttagggctgaaggggattttcctcgtcaccaccctgctcggcctgaccggtctgtggctggcggtgctggcggataccggcgccaccgtgctggtaacggctaacgcgctgcggttattgcgtaagaagttgtagcatagataccggcttccctgctcgcgctgcgcttagcagggctacggttccagaccgtcgggtagcccggataaggcgctacgcgccgccatccgggagaggctcagtggcttttgcggatcaggtagcggtacggcagggcttcggtttcctgggccaccagctcatgctccataaagcggcagaatcccgggatatcgcgggtggtggccggatcgtcagcaataatcagcagcgtctcgcccaccggcatcgtccgcacggttttacgcaccatcatgaccggctccgggcagcggagtcccagggcatccagggtgtggtcaggagtggagaaaagttcgctcattttagtctcacgtcaacaaaacggccctagtttaccccctgctcgccagtacgcaagccaggttaacgtttgcgcgaaaaacaaccattgcattacgccggcaacgcagtatcatgcagccgtttttaattgggttccctcaccccaacgttccgctgccgattgctcattcacctgaagcatgacgggcataaaaaggtcacaatatgaatccgtttactaccgtacagcgcaaaaaagcgctcgtctggctttcgctatttcatttgctggtcatcacctccagcaactatctggttcagctgccgatctccatctttggtttccataccacctggggcgcgtttagttttccgtttattttcctcgccaccgacctgacggtgcgaatttttggcgccccgctggcgcgacgcatcattttcgcggtgatggtcccggcgctggccatctcttacggcatctccgcgctgttctacatgggcgaatggcagggctttgccgcgctgggcacctttaatctcttcgtcgcgcgcatcgccgtcgccagctttatggcctatgcgctggggcagatcctcgacgttcacgtctttaaccgcctgcggcagagccgccgctggtggttggcccctaccgcctcgacgctgttcggcaacatcagcgataccgtggcgtttttctttatcgctttctggcgcagcccggacccgtttatggccgcccactggggggaaatcgccctcgtcgactacagctttaaagtgcttatcagcatcattttcttcctgccgatgtacggcgtgctgttaaatatgctgttgaaaagactggcggataaatctgatttgtcggcattacagccgagttaaaggtactcgcgggctgatgtgttaagatagccggatgagccattagtggccgtttatcgaaaggaagatgtcaatgcgcaatttggttaaatatgtcggtattggcctgctggtgatggggcttgccgcctgcgataacagcgattcaaaagcgccaaccgttggcgcagcagcggagagcaatgccagcggccaggcaatcagcctgctggatggcaagctgagcttcaccctgcctgcgggcatggccgaccagagcggcaaactgggtacccaggcgaacaatatgcacgtctactctgacgctaccggccagaaagcggtcatcgtcatcgtcggcgacagcaccaatgaagatctggcggtgctggcgaaacgcctggaagatcagcagcgcagccgcgacccgcagctgcaggtggtgagcaataaaccgctggagattaaaggccataccctgcagcagctggacagcatcatctccgccaaggggcagaccgcctggtcttccgtgatcctcggcaaagtggatgacaagctgctgaccctgcaggtcaccctgccggcggataaccagcagcaggcgcagaccgaagcggaaagcatcatcaacaccctcaccatccagtaattactggcctggtgcgctggcctccggttcgctaaccgggggccgtttttttagccgccagcccaacagcagcgccgccatcaccagccccgccgcggcgagataaatcatcgagatcccggtccacgccatcagcaatccggccagcggcccgctgacgcccaacgacaaatccataaacacggtataggtcgccagcgccgacccctgattgtgctgcggcaccgctttcaccgccaccacccccagcgccggaaagaccagcgaaaagccagccccggtaaggaaagtaccgattttcgccatcatcggcgtatcggcaaagccgaccagcagcaggccgatcgcctccacgctaaagcagagcatcgccacgttcagcccgccgagtcggttaatggcgttgggaaacagcagccgcgcgccaacgaacgcgcagctgaataatgtcagcgcgaaagccgcgccgtcccaacctttggcgtcataaaatagcgtgataaaggtggcgatcaccccaaagccggcggaggccaacgccagcgccatgccgtagggccagacccggccgagcaccgcgcgaaacgacatcgctttgcctttggcagccttcaccgccgcgcggggcagcgcgcagaggatagccaccagcgctaccgccataatgaccccggccagaccgctgaggccaatgtgcgaatagcacagcacgccgagcggcgcgcccatcgccatcgccccataggtcacaatcccgttccacgagatcacccgcccgatatgcagcgaaccgaccacgccgacgccccacagcgtcgagcctgtgccggcgaagctctggccgataccaaggatcacccgtccgaggcataacagcagcaggctaatcagtggccagccgctgccccaggcggccagcagatagctcaaaccgctcaaaaagcagccgccgaggccgaagacgacaatctttttgggccccagcaggtcggcatagcgcccggcatgcgggcggctgagcagcgtggcgaaatattgcaggctaatcaccagcccggcccagaaagcgctaaagcccatgacatcatgaacatagccgggcagcaccgccagcggcaggccgatggtgaggtagctggcaaagttaaagataacgacagagacaatccgcagattgaggcgcagtccattaagcgccggttcggcgacgggttcgggcatcaggttccaccagatttcgacaaccagctttcactattaccacgctgtcggcggaaaagcagccctcctttcggaatattggcagtcggcgaaccgctacacttatctggcgcgactcataaaaggaatacctatgtcccctccgcaggctgataaagccgggcttcatattttacttaagctggcggcgctggtgattatcctcgccgggatccacgccgccgccgatatcctggtgcagctgctgctggcgctgtttttcgctattgttctcaacccgctggtcacctggttcattcgccgcggggtgcggcgtccgttcgccattaccctggtggtgacggcgatgctggtgatgctcaccgcgctgctcggcgtgctggcggcgtcgctcaatgactttgtcgccatgctgcccgatttcaaccgcgccctgacgcgcaagatcctccagctccaggagtatctccccttccttaatctgcatatcaatccggagcggatgctgcggcgcatggattcagaacggctgatgacctgggccacgacgctgatgacccagctttccggggcgatggccagcatcgtgctgctggtgatgacggtgatctttatgctgtttgaggttcgccacctgccctacaaactgcgttttgccctcaataacccgcgcctgcatatcgccggattgcaccgggcgctgaaaggcgtcacccattatctggcgctgaagacgctgattagcctgtggaccgggctgattgtctggctggggctgctggcgatgggggtacagttcgccctgatgtggggggtgctggcgtttttgctgaactatgtgccgaacattggctccgccatctccgctatcccccccatgctgcaggcgctgctgttcagcggcatctatgagtgcctgttggtaggggcgctgtttctggtggtgcatatggtgctgggcaacatggtggagccgcgcatgatgggccaccggctggggatgtcgaccctggtggtgttcctgtcgttattggtctggggctggctgctggggccggtgggaatgctgctctcagtgccgttaaccagcgtctgtaaaatctggatggaaaccaccgtcggaggcagcaagctggcgatcctgctcggcccgggccgtcccaaaagccggctccccggctagcggcgtttcaccggccagaagatggtcaatacgccggcgacgatgatcgccacgcccagcagcgattgccagtagaacggctcatgccagccgggcagccagatggcggcggcccacacgaggatatagctcaggctcagtagcgcatacgctttcgacagcggcaggcgatggagggcaaagtaccagcagaccatcgacagcaggtagcccagcaggccgaaaaacaggccgaaagtcccgggctggaaatgcagcagatgctggagaaatgccacaatatcggtcagcggcggcaaggccaccatggcgctgcgcagcagcaactgcgcggcgctgacgaggccgacgctgagtaatgcccagaaaaagcccatcagacgctggtccccagaatgacaatgcccacgacgatcaacccgacgccaagccagtggcgacgggcgaccggctcatgccagatgccccagcccgcgagggtaacccagacgaaattcagactcagcatcggataggcgatgctgaccggaatagactgcaggacgctcagccacagcagcatgccgcagcccagacataacagcgccatccccaaccagaagagtatatggcgactccgccgtccgcgacgggacgggcgggtcgcctgtttctggcagagctgtccggcgcagctcagcaggctggcgcacaccagacagatccagacgctcattgcggcaggtactgaaggaaaacgacccggcccagctcgtaggcgttatccggtttcggtaacggtaagtcgagcatactctctcctttatccatcaacagcaccagcgagaccggcccctgctgacgatgcgcggccagccagtcggcaaaaccggcctggctgacaaagcttccctgagcatccggccagtcgagaccgtacttcagctcaccctgtttgtcgaacataataatatcgcttcgcttcagctcccaggccaggccgccggcgatcccaacgttgttggtcaggacgtaacggctgggctgcagggattcgctgacgatatccacgaggaactgcggctgtttgctgtcgataacccggtccgggatggcgaagcccaccagcagcgccaggccgagcggacagagcgcggcgaggctccagcggcggccagagtctttcatcgccagccagcccatcagcgcccagacggcaaaagcgatcgccgccagcagacatttatacagctcaatcttggtccacaccggcctatgcatgaagccccacggcgagaccaccagcacggcgataagccccagcaaaccaacgcccaggttgatcatcccgttgatgcgcaacgctttcgcgccggtctttgcggcctccagcgcgtagcgggccatcaggatcgacagcggcgcaaagcacggcaggatataggtcggcagtttgcctttggcgatactgaagaacaggaacggcatcgccacccaacctaacagatacagcgcgccgcgggcctcatcgcgctcaagccagccacgctttagcgcccccggcagcagggccagccacggcagactgccggcgatcaggaacgggatgtagtaccagaacggcgctttgtgctgggcgtctttttcagcaaaacgctgaatatgctcgacccagaagaagtagcgccagaagtccggctcgcgctgggcgatagccagcccccagggcagcaccaccagcgtacagacgatcaccgccagccagccgtaggtcagcacttcacgccagcgtttacgggcgatcacccacggcagaacgcccaccaccggcaccgccagcgccaggaagcccttggtcatcacccccatcccgcaggcgacgcccagcagcacgtagcccagtattttgccgctgcggctgtgcgcctgcgccgcaccccagaagctgcacatcgccagcgccagccacagggtgatcatcgggtccagcaccgcataggtgccaatcgcatacaccagcatcgcggtgaggaagataaccggcgacatgatagctacccgcttatcacgaaagatccgccacgccagccaggccaccagcagggcggtcatggtgatggcgaagaccgacccgaagcgtacgccgaagttattatggccaaacagccactgaccgatactgttgatccagtaaccggcaatcggtttttcgaagtagcgcaggccgagaaaatgcggtaccacccagtcgccggtggccagcatttcacggctgatctccgcgtagcgggtttcgtcgggttgccaaagcaaacggaaattgagcggcagcagataatacagcgcaaacagcgcaatcagagagacgccatagcgaatgcttttcatcaaatacccgaagtcagtaattgttcacgtccgagccagccttcccggccagccagttcaccacgaaccactttgcctgagggcagctcgctaaagtcagcgggcagcagctggctcagtgggcaaaactgaatttcttcttccgccgccatggtcagtagttcattaaactgatcggcgtaggcaatgccttccacttcagcgtgaatggtatagaccggcacgcccgcatcgcgatggatgcaatccagcaggtagcggttaaagccggcgatatccaccgccgtgcccaccgcctcgtcccaggtcggcaacgtgaccgggatctgcacggtaccagagacgccgctgccgagctggggcagaaacggccgcgtgccgcgacagtcgctgttgtagagaaaatcgaaggattctttggctttaaccacccgctgatcggcgcgccagccggcgacggccgagcaggtcaccggccggccgatgatgcgctcgagctccagcaggccgcgctcaacctccagcgccagcctttcctgcggccagacgccgctccacgcctgccagctgtagtggtcccaggcgtgcaggccgacttcatgagattcggcggcggcgcggatcaccgcttcgttccctgcgccgatgcggcgccccggccaggcggtgccggccagcagaatatcccagccgtacagcgaggcggctctggaacgcagcatcttccacagaaacttcggttttaccaggcgccacaggtggcgccccatattgtccggcccgacgctgaagaagaagcttgcctggatcccatgccggcccagcagctccagcagccgcggaacgccgtcccgcgtgccgcgaaaggtatcgacatctatgcgtaagccgacctgtttcatggatttttatcgtccaccagttcaaccgtgcgcaggaagaagtccagcgtgtgttcgaccgtttcttccatctccaccttcggctcccagttcaggcagcgtttggcgttgcggatgctcggcttacgatgctcaacgtcctggtagccctttccgtagtaatcgctgctttccacttcacggaagccggcgaacggcgggaagcgatcgcgcagcggatgacgttcgaagcaggcgagcagcatttcggccagctctttgatgctcgcttcgttatccgggttaccgatgttaatgatctgcccgtcgcagcggccgtctttgttctcgatgatgcggaacagcgcttcgataccgtcgctgatgtcggtgaaacagcgcttctgcttgccgccttcgataagcttgatcggcgacccttccaccaggttgaggatcagctgagtgatggcgcgggagctaccgatacgcgcggcattaaggttatccagacgcggccccatccagttgaacggacggaaaagggtgaacttcaggccgttcttatcgccataggcccagatcacgcgatccagcagctgcttggagaccgagtagatccagcgctgtttgttgatcggccccaccaccaggttggagctatcttcgtcgaagtttttgtcggtgcacatgccgtacacttccgaggtcgacgggaagataatgcgcttattgtatttcacgcagtcgcggatgattttcaggttctcttcgaaatccagctcgaacacgcgcagcgggttgcgggtgtattcgataggcgtggcgatggccaccagcggcagcaccacgtcgcatttcttaatgtgatactcgatccactcagagtgaatgctgatatcgccttccacaaagtggaaacgcggacagtcgagaaaacggctgatggcgtcggagccgatatccagaccgtaaatctcatagttgtcgtcctgcagcaggcgctcggtcaggtggttaccgataaagccgttgacgccgaggatcagcacccgggtgcgacgcttaatcgccaccaccggtttgctgctgatcaccgccccggacaccaggcccagcgcctgcgccagctgagcgccctgcatgtacacgccgcgttcggtctggccggtgacaatctccagcgccccgtcctggcacgcgacgatcagcggagcaatggagagcacggtgcccggtttagctgctggcaaatcgtggcgaacgcgggatttccagacgataaacttgttcgctccggcgtagccgaaggcgcccggccacggatccgagaccgcacgcaccagattgtgcagggtctgcgccggcagctcccagtccagccggccatcttccggggtacgacgccccacataggttgcctggctgtgatcctgcggacgctcatcggtggtgccggcgaggatcgccggcagcgcccggctcagcagctcagtggcggcggcgcacagcttacgatgcagcgtcagggcggcgtcatccgcgccaatcgccacggcctgctgggcgacgatatcgccagcgtctgcgcggttcaccatccggtgtagggtgacgccggtttcgctttcgccattgaccaacacccagttcagcggcgcgcggccgcgatattttggcagcagcgaaccgtgcaggttgaacgcccctttcggcgccagattgaggatctcatcgcccagcaggttgcgatagtagaaggagaacagtacgtccggcttcatctcgcggatacgctcaatccacagcggatggttcacgtcttccggcgcccacaccggaatgccctgctcggcggcaaggcgcgccacggagccaaagaaatggttttcgccagggttatccgggtgggtgaaaatagcagcgatatcatacccggcgtccagcagagcctggataccggtgcagcccatatcgtgataagcgaagactacggctttcatgaacgatcttcctctttagatgccgtttccggctggcgaacaacacgttgaataaagtagcgggggcgggcgcgcacgtcgttatagatgcggccgatatactccccgagcaggcccataccgacaaactgggcgccgatgaacatgaacagcacggcgaagagcataaacaccccttccgccgcccactgtgggccgaaggccaggcgcagcaccaccagcagcaggccgaaggcgaagcccagcagggcaatcacgctgccgaaaatgctgagcagacgcagcggcgtggtggtcagacaggtcaccaggtcgtacatcaggttgatcaggcgcataaagctgtatttggagtcaccgaattcgcgctcggcgtgcatcaccgggatctccaccgcgcgccgggcgaaggtattcgccaggatcgggataaaggtgctgcgctcatggcagttgagcatggcgtcgatgatatggcggcggtaagcgcgcagcatgcagccgtagtcgcccatcgctttgccggtggtgcgctggatcaggcggttgatcatcttcgacgcggttttacggaagatgctgtcctgacggttctggcggacggtgcccaccacgtcgtaaccttcatcagccttcgccaccagccgcgggatctcctccggcgggttttgcaggtcggcgtcgagggtaataatcagatcgccggttacatggctgaagccggccatgatcgccgagtgctggccgtagttacggtttaacagcacggcgacgacgtggctgccttccgcctcggcggcttcggtgagcatgcgcgcggaatcgtcgctgctgccatcgtcgatcaacagaatttcatattgccgccccagggtggcgcaggcggcatccgtacgacgaagcagttccggcaggctatcctgttcgttataaaccgggataaccaccgagaccttcttcacgggagggtaagtaagcatatcaacgtcctgacaactggcgcagtgcggagataacgcgagtgacatcgtcatcggtcatatccgggaacaacgggagagagcagatgcgggcgctgttccattcggtattcggcagggaaacctcagggaagcgctcgcggtaatatttttgcgtatgggccgcacggaagtgcaggccggtgccgatgcccatcgccttcagcttttccatcagcgcgtcgcggctgatgccgcacgcggcctcatcgacgcggatgataaacagatgccaggcgtgctggtgatcccaggtcgggacgctcagcggtttaaacggcgtgtccgccagctcgcgcaggtagcgctgggcaatctcggtccggcgctgattggcgtggctcagtttttccagctggaccagcgccagagcggcgttgatatcggcaaggttgtacttgaagcccggggtgatcacctccgcctgcggcgcgcggccgtgggtctggcgatcataagcgtccacgcccagaccatggaatttcaggctacggatgcgggaggccagctcgtcgtcgtcggtgacaatcagcccgccttcggcgcaggtcatgtttttgatcgcgtggaacgagaaaatggcggtcccctgccagcccacgtggcggcctttataatgggtaccggccgcatgggcggcgtcttcgatcaccgaaatgccatggcgctcgcccaccgcgcgaatggcgtcgatgtcggctggcgcgcccgcgtagtgcacgggaattatcgctttggtacgcgaagtgatcgccgcttccaccgcgtcaggggtaatcatcagattgtcgttatcgacatcgatcatcaccggcgtggcgcccagcaggcagatcatattgagagtggagacccaggtctgggacggcgtaatgacttcatcgccggggccaatacccagcgccatcagggtcacatgcatcccgccggtcgctgaactgacggcaatcgcatgacggttgccggtcagctggcagaatgccgcttcaagtgcctgattcttcggcccggtggtgatccagcccgacgctaaaacttcacgcagggctgccagctctgcgtcgcccatcgacgggcgcgaaaaaggcaaaaaatcgctcatcatcatcctgttctgtagatgacccacgcacgaatctgggtcgttagaataaaatatcctgcgcctgcggacttaaacgaaattaaaatgaagtgagttcagcacggcattccatttcagggtatctcgaccactattaatgtagtcgaccttgcttaggataatattaagaaattaatatttcttcggaataagaaataaattcttaataaacagtatgataggagttttttatggcagaaatttgacggagatgcgttcctgtcacgaaaaagagaacaggaacgcaatagttgaaattaaacgagaactaaaccagttcacaatttattattctgtcattgtcacgcttaatgacaaaaagttagcgcagatcacaaagttatttctgctgaattacaaatttgcaggaaaatccgcaggcaattcgctcgccgggcaattaatgacctcgtcattatccgcgccacagtcgcgaatgaaggtgatagtggcgaactcgtcaatcacttccgtcgggtaggccgggccggcatcgcgatacgaattcatcagcggaatatggtcgttctggaagcagatagttttttccgggttattcatgatccagcgcgggaagaaaatagtgccgtggaacagtttgtcgcccaggttgacgatcaggctgacgtcggtgccggtcggttcggtccaggagattttgtagatactttcccccacccgcacaatgtacgcttcctgatctttcacccagcgattgccgacgatgccgctgtgaatacggtagtcgagggtgtggccatttttgacgtaaatctcgtagttccagccgttgtcgtaggtatagaccagatgtttaccgataaagccgctgaggtcatgtttgtcgaaagtgctcatcatttattctcctctgttttgttgaggacagcatacgtctttaaaaaatgaatgaataacgctatgtttggattaaatacattcaaattttagattgattatgcacaagacaaccctggagcagtgggcgttactcgaaaaggtagtggaattggggagctttgccagagcggcggaggagaccaatcgcagtcagtcatcggtaagctataacctcgcgctgctgcaggagcgcttaggcgtggcgctgctggcgccgtccggccggcgggcggtgctgacgccggctggcgaactactgctgaatcaggtcaagccgctgctgcaggccttcgcctacgtcgagacgcacgccgccactctgcgcaacggggcgcggacccgcctggatctggtggtcgacagtattttcccgcgccagcggctgttcgcgattttacgccagtttcagcagcgctatccgcagacccaggtcaggctcaccgaagtgctggaaaacctggatgacgagagcgcggcgcggacggaagccgatgtgatggtgttgacccgccgccaggatattaccggccgcggggagtggctgatgaatattgatttcatcgccgtcgcccaccgcgaccaccctctcgccgcgctggacggaccgctggaggatagcgcgctggcgccgtggccgctggtgcgcattgccgatcagggcggcgatagccaggcgccgcgagacgcctggaccttctccaccattgatgccgccattgatgcggtgatgtatcaggtcggcttcggctggctgccggaggagcgcattcgcccccatctcgaccagggcgtgctgaagcggctgcccctcagccatggcgcgcgccgcgcgacgccgctgcatctgatcgtcaagcgggacctggcgccgatcgacgaacaggtggccacgctgctggcgttgttccggacgccctgaggggtaaggcggcgctggtcgcctgggcgtaatgatacgattttcttatactttccggcgcaatattgatccaggttactctcaaagtatgatgaatcactaaaatcgtcatactttcctgtcgttgagattgccgtcttgtctattatccgcctcaccctgctggcgctgctcgcctgcgtccctctgctggctcaggccgcgccgtaccagctcaccaccgcctggccggttaacgtcggcccgctgaatccccatctctatacgcccaaccagatgtttgcccaaagcatggtctatgaaccgctggtgaagtatcaggctgacggcagcgtacagccctggctggcaacccgctggcgtcactccgccgacggcaaaacctggtggttcaccctgcgcgacgatgtggccttctccaacggcgaaccgtttaatgcccaggccgcggcggccaattttcaggcggtgctggccaaccgccaacgccacgcttggcttgagctcgccaaccaaataaccgacgtgcgggccctcagcgccaccgagctgcagatcaccctgaaaagcgcctacgcccccttactgcaagagctggccctgccccgcccgttccgcttcatcgccccctcgcagtttatcgatggcggcaccgccaggggcattaaagccccgatcggcaccggcccgtggcggctggcaagctcgcagctcaatcagcgcgatgtgctggtgcgcaatgagcgctactggggtcgcaaacccgcgctacagcaaatcaccatcaaggtgatccctgacgccaccagccgggcggtggcgttcgaaaccggggaaatcgatatgctctacggcgatgaagggctgctgccgctggacaccttcgaacgctttcgccatcaccccggctacgtggcgcgcctatccgccccggcggagacggtaatgctggcgctaaacgccagccagggcccgacccgcgagcaggcggttcgtgaggcgctcaactacgccgtcgataaacagacccttgtcgatagcgtgttgtatggcacccagcaggttgccgacaccctgtttgccccctccgtcccttacgccccgcagaatctgacgccgcgccgttacgacccgacaaaagcccgcgccctgctggaacaggccggctggcagcagctggagggccagccctggcgacaaaaagccgggcaaccgttggcgattgagctggcgtttattggcaccgacgcgctggctaaatcgatggccgaaattattcaggccaatctgcggcaggtcggcgtgcaggtcaccctggtgggcgaggaggaaagcagcatttacgcgcgccagcgcgaaggccgcttcggcatgatcttcaatcgcacctggggcgcgccctacgatccgcatgcctttttaagctcgatgcgcgtcccttcgcatgcggattaccaggcccagcgcggcctgccagacaaggcactgattgataaagagattagtgaagtgctgaccaccggggacgaggcgcagcggagaaaactgtaccatgatgtgctgacccgtctgcatcaggacgcggtgtatctgcccatcagctatgtctcgctgatgtcggtcgcgcgccaggaggtcggggagatcccgttcgccccggtgaccagcgagatccctttcgaccagattaccccggtaacgccataatgctacgctatattttacgccgcctgctgctgctgatcccgctgctgctcgccgcctcagccatcatctttctgctgctgcggctcggcgccggcgacccggcgctggattatttacgcctgtcgaacctgccgcccactgaagagatggttgcctcgacccgcgagctgctggggctcaaccagccgctggcaatgcagtatctgcactggctatggcgggcgctgcacctggatttcggtctctcctatgccacccagcgcccggtgctggacgacctgctgcacttcctgccggccaccctgctgctcaccggcgcggcgctggcgctgatcctcgtcacctccctgccgttgggcatctgggcggcgcgccatcgcgatcgcctgccggactatatcgtacggctgattgccttcctcggcgtctcaatgcccaacttctggctggcctttctgctggtgatgctcttttccgtgcatctgcagtggctcccggcgatggggtatggcgactggcagcacctgattttgcccgccgtctccatcgcctttatgtcgctggcgatcaacgcccgcctgctgcgcgccagcatgctggacgccgccagccagcgtcacgtgatatgggcgcggctgcgcggattgagcgcgcgccaggtggagcgccgacatatcctgcgcaatgccaccctgccggtggtgaccgccatgggcatgcacattggcgagctgatcggcggcaccatgattatcgaaaatatctttgcctggcccggggtcggccgctacgcagtttccgccattttcaatcgcgattacccggtgatccagtgctttaccctgatgatggtgacggtgttcgtgctggctaatctggcggtggatgtgcttaacgcggcgctcgacccgcgcctgcgccgccacgaggaggtgagcgcatgagagggctacaaagttttcgctggccgataaagctcgccctgttagtcatcgcgctgctggcggtcatcgccatcggcagcggctggtggctgccctgggatccagcggcgattgaccttcagcagcggctgctgccgccgggcgcagcgcactggctcggcaccgatcatctcggccgggatattttctcacgcctgctggccgccacccgcgtttcgctgggggcggtgatggcttgtctgctgctggtgctgctgatcggcctggcggtcggcggctgcgccggactgctgggcggccgcgccgaccgcggcctgatgcgcatcgccgaactgtttatgacctttccgacctcgatcctgtcgttctttatggtgggagtgctgggtaccgggctgaccaatgtgatcctcgccattgcgctgtcgcactgggcctggtacgccagaatggtgcgtaacctggtggtttccctgcgccagcgcgaatttatcctcgccgcccgtctgagcggcgccagccagtggcggctgttcagcgaccatctggccggcgcggtgatcccctcactgctggtactcgcctcgctggatatcggccatatgatgcttcacgtagccggcatgtcgttcctcggtctcggcgtcagcgcgccgacggcggaatggggggtgatgatcaacgacgcccggcagtatatctggacccagccgctgcaaatggtctggccggggctggcgctgttcatcagcgtgatggcttttaacctgctgggcgacgcgctgcgcgatcgtctcgatccccacctgatcgcggagcatagccactgatgccgcagaagatccaactggaagagatctcgcttgccgctgaccgaccgctggtcagcgacgtctccttcaccctgcgccgcggccaggtgctggcgctgctcggcagcagtggttgcggaaaatcgctgacctgcgccgccgcgctgggcctgctgccgcccggcgtcaggcaaaccgccggccgggtgcttctcgacggcattccggtgcacggcgaacagctgcgcggggcgaccatcgccaccatcatgcagaacccgcgtagcgcctttaacccgctgcagaccatggccgcgcatgcccgggaaacctgccgggcagcgggtcgtgaaacgaatgacgccgtgctgctggcagcgatggaggaggtcggtctggacaatccgcgggcgctactgaagcgctacccttttgaaatgagcgggggcatgctgcaacggatgatggtcgctctcgccctgctcagccgcgcgccctttatcatcgccgacgagccgacgaccgatctcgatgccatcgcccaggcgcgcatcctcgacctgctggcggatattgtcgccaggcgcggtctgggactgctgctggtgacgcatgacatgggcgtcgtggcgcgcctggcgcatcacgtaacggtgatggagaacggtcgcctcgttgaacactgcgatgtgaatacgctatttagcgccccgcggcacccgctcagccagcgcctgctggccgctcatctggcgttatacggtctggagaaaacaccatgaatttactcagcgctaccggggtgagtcacgattatcctcaccacggcagggtcctgcatgcgatccatctcgccatcgcccccggcgaaacggtggccctgctcggacgcagcggctgtgggaaaagcaccctggcgcggatgctggtgggtctggaaacgccgcagcacggcgatattgcctggcgcggcacgccgctggccgccctgaagggcgaggccatcggcgccttccgccgtgatattcagctggtatttcaggatgccttcagcgcggtgaatccgcgcaaaacggtgcgcgagatcgtcagcgagccgctgcgccatctgttgtgcttgtcgcgtgaggcgcgtgcgcggcgggtggaagagatgctgctggccgtcgacctcgcgccgtcgctgctcgataagcgcccggcgcagctcagcggcggacagctgcagcgcgtctgcctggcacgcgccctggcggtacggccgcagctgttgatccttgatgaagcggtttcaaatctcgatctgctgctgcaggcggagattatcgccctgctgaagcgtctgcaggcgcagtttgacaccgcctgcctgtttatcacccatgacctgcggctggtggagcgcttttgccagcgagtgctggtgatggagcacgggcgcatcgtcgaaaccgcaacggttagtctaccgctacgcctgcgctctcctgccggacaggcgctccagcaggcggtgctccccccttttcctgccactctgcttaacgaggccatgccatgcagcgcgtaaccctgacccttgatgatgacctgctggccgccctcgatgcgctcagcgcccgccgcggctaccacaaccgttcggaggcggtacgcgatattctgcgcgacgccctcaaccaggatcctccgtcgccggaatcacggcgcgggtatgccgtcctgtcgtacgtgtatgaacatgagaaacgcgaactggcgagccggctggtggccacccagcatcatcatcacgatctctccgtcgccacgctgcatgtgcatatcagtcatgacgactgcctggagattgcggtgctgaaaggtgatatggccgaggtacagcattttgccgacgacgtgattgcccagcgcggcgtgcgccatgggcatttgcagtgtttagcggatgattaattatttgaaaattcttgggtggtttatcaacagttgataaaccatataaattatacgctttgttaattatcccgcttcgccaataatggcgcctcatttaacgatctcgttatggcgaggctcctgcataaatacaagttaccgccctgttggtatcgagagagaccactcagggaaatacaggcttccatcgaatcaaggtgttgccaaggtaacttctggcggtcatgaccgttcagatacgttatgcagtgctaaaaccaggacgtagggatctgcctgcgctaaccctgtcttgttcgcccctatgagtgattttttatagggatttttaaacatgtcttccattcaactctgcgacgcccatcaggcgacctctggcttcgacggcgatgcgatcgcccagtacatgcgtaccgattttattacgctgcaggaacatctcagcgttcatgaggcgcgcgaacactttatctcccagctggccagcgatgatattcccgggcaggtgtttgtcgtcgccggcaagaagctgcgtggcagcctgtcggtcaaaaagctactccaggaaacggatatcaaccagtctatccgccacctgatggacagctgcctgtttcgcgtcaaacctgacgatgagcgccagcaggtgattgccgagctcagcgagcgcggcctcgacctggtccccgtcgtcgataaaggcgagctggtcggctgcctgatggagaaggagatcgcccatctgctggaggatgacgtcaccgaagatgctcagctgcagggggcaacgctgccgctggaaaaaccgtacctcgagatcagcccctggacgctgtggaaaaaacgctcggtgtggctgctgctgctgttcgtggccgaagcctacaccagcagcgtactgcagcatttcgaagaagccctggaatcggccatcgcgctggccttctttattccgctgctcatcggcaccggcggcaacagcggaacgcagatcacctcgacgctggtgcgctcgatggcgctgggggaagtgcgactgcgcgatatggggcgggtgatccgcaaagaggtatcgacctcgtttctgattgccctgaccctgggcctggcgggctgcctgcgcgcctggatgatggggattggcatggaaatcacgctcatcgtcagcctgacgctggtgtgcattaccctgtggagcgcgattgtctcctcggtcattccgatggtgcttaagcggatcggcattgacccggcggtagtttccgcgccgtttatcgccacgctgattgatggcaccgggctaattatctatttcaaaatcgcccagtattttcttgggttgaactgatcatatacgtccgggcaccagggcgcccggacgcgtagattacccttccaccagcgcctgcgcgcaggcccaggcgcttgaccacgcccactggaagttataccccccgagccagccggtaacgtccatcacttcgccgataaagtagagacccggcgccttacgcgcctccatagtacgcgacgagagttcgttggtgtccacgccgccgagggtcacctccgccgtccggtagccttcggtgccgttcggctgcacgcgccaggcggttaacgtctccaccagcgtctgctgatcgcgaacgttcagttgcttgagcgtcacatcaggtatctgccccagctgctgcagacactccaccagccgcttcggcagctgcatcgccagggtgttcttcaggctctggttgggatgcgcgctgcgctgctcgttaaggaagtcatcaagatcgcagtccggtagcagattaacggtgacgaactcgccgggctgccagtagctggaaatttgcagcaccgccggtccggaaaggccgcggtgggtgaacagcagattttcgcgaaacagagtgccgttctcggcggtaatggtcgacggcaccgacacgccggagaggacctgcagctgctcaagcaatggcttgtggagggtaaacggcaccagccccgcgcgggtcggcagcaccttcaggccgaactgctcggcgactttatagccaaacggcgaggcgccgagccccggcatcgacagaccgccggaggcgatcaccagctttttggtcatcagcgtttcgccgttcacctgtagccggtagccttgttcatcgcgctccacgctgaggatttcgctgcgcagacggatctgcacgccgcccttttcacattccgcgagcagcagattgacgatctgctccgccgaatcatcgcaaaacagctggccgagggtcttctcatgccaggcgatgccatatttgccgaccagctcgataaagtcccactgggtgtagcgcgccagggcagatttgcaaaaatgcgggttttggctcaaataggccgtcggttcaacatacatgttggtaaagttgcagcggccgccgccggacatcagaatttttcgccccggctttttgccgttatccagcagcaggacgcggcagccgagctggcccgcctgcgctgcgcaaaacatacccgccgctccggcgccaacgacaatggcatcaaacctttccacaccgcgttcctcgttccccaattgtcgggttttgtaaatatttcactctggtcacaccagcgggaaaaatcccgcattagatacatcattgaaagatataggattactcccaacagggtaaaacctaaacaggaagaaaatcaaaaaaagtctatatttcactttgcccgcgccgctaaagtcactgataatgcgccgcgttcatgtcctcaaaatggcgtaacgtcctatgctacatttatttgccggtctggatttacataccggactattattattgcttgctttagcttttgtactgttttacgaagcgattaacggtttccatgataccgcaaacgcggtggctacggttatctacactcgcgcaatgcgctcacagctcgctgtggcgatggcggcgctcttcaacttcttcggcgttctgctgggcggtctcagcgtagcctatgccatcgtgcatatgctgccgaccgatctgctgcttaacatgggttccgcacatggcctcgccatggtgttctctatgctgctggcggcgatcatctggaacctcggcacctggtacttcggtcttccagcttccagttctcataccctgattggcgccatcatcggcattggtttaaccaatgcgctgatgaccggtacttccgtggttgatgcgctgaatatcccgaaagtcatcggtatttttgcttcgcttatcatctcgccgatcgtcggtctggtgatcgcgggcggcctgattttcctgctgcgtcgctactggagcggaaccaaaaaacgcgcgcgtatccacctcacgcccgcagagcgtgaaaagaaagacggtaagaaaaagccgccgttctggacccgtatcgcgctgatcctgtctgctattggcgtgtcgttctctcacggtgctaacgatgggcagaaaggcattggcctggtgatgctggtgctgatcggcgtcgcgccggcgggtttcgtggtgaatatgaatgcctctggttacgaaatcacccgtacccgcgatgcggtcaacaacgtggaaaccttcttccagcagcgtcctgaactgctgaaaaaagccaccggcgtcgatcagctggtgccttctccggataccaataccgcggccaatggcgagttccactgccatccggcgaacaccatcaacgcccttgaccgcgtcaaaaccatgctgaccggcgttgagaactacgagtcgctaaaaccggaacagcgcggccagctgcgtcgcatcatgctctgcatctccgacaccaccgacaaggtggcgaagctgccggatgtgagcgctgacgaccagcgtctgctgaagaaactgaaaaccgatatgctgagcaccatcgagtacgcgccaatctggattatcatggctgtcgcgctggcgctgggtatcggcaccatgatcggctggcgccgcgtggcgaccaccatcggtgagaagattggtaagaaaggcatgacctacgctcaggggatgtcggctcagatgaccgcagcggtttctatcggtctggcgagctacaccgggatgccggtttccaccacccacgtactctcctcctcggtagcggggacgatgctggtggatggcggtggtctgcagaaaaagacggtgaccagcattctgatggcctgggtgctgaccctgccggcagcgattatcctttcaggcgtcctttactggctctccctgaaactgatttaagcgttattcgttcaaaacgggccagcttgctggcccgtttttttattctgaaacgttagtgccagatcatcagcgcaatcaggctcaccaccaccaggccgcacagggcgctggtcaggataaactggcgacgaacacgttcgcagcgacgaataaattcatcatcgtgatggtcacggtagcgctgggcatagatataccacaccagccgcatctgtttgctgggctgcccgtgcgaggtaaaaaagccgccgccatcaacatactgatagagcaagggatcgcaaccacgtagcaccaccaataatgcacgcaacgatgagaagtagcgtgccatattcaccacacaaacgacacacagggcccaaaacagcgcaatagtgctgatcatacctcctccccggcgacccgcctacggagaaaacctccgcggctaccgctccccaaataacccacgacgataccgtaaagagtgcgattccgatcacatttatttttccgaccggctcattaaatagtgtaggagatccattaatttttttaccacaaggttattcgttatcaatacgtaagacggataaatttgtttaacttttaggtgaacccagtgcattgacggagtgcggggggcgctataaggtaggaaatatcttctacaatgaagtccttaaaggctaccctcccgcgaatgtagcacgcaggacgcgggcgaaacggcagcgccagctgtcaggtccaatggtcatcgacaaacttatggaaggagtaacactatggcttacaaacatattctgattgcagtagacctgtccccggagagtaaagtactggttgaaaaagccgtttctatggcccgcccgtataacgcgaaagtctcccttatccatgtggatgtgaattactccgacctctacaccgggctgattgacgttaacctcggcgacatgcaaaaacgcatctccgaagagacccatcacgcgctgaccgagctctcgaccaacgcaggctatcccatcaccgagaccctgagcggcagcggcgaccttggtcaggtgctggtcgatgcgattaaaaaatacgatatggacctggtggtctgcggccatcatcaggacttctggagcaagctgatgtcctctgcccgccagctgattaacaccgttcatgtcgacatgctgatcgtcccgctgcgcgacgaagaagacgaataaccgtctcgttttatccgcgcaatacgcccgccgatgcgggcgttttttattttcgctttccctcgccatgcggcagaacttcaatccataaaatcgccattcaattagtgtgatcaaccagttattcggcgaaatatctatataataatctattccataagccaataaccgcagcatggcgagttatcagacattttcggcgcgttctggcatacgcgttcatactttttgggaaagtaatacaaggcgaaggaatatgaatacaactgcacctacgggcttgctgcagcaacctcgtccgttctttatgatcttctttgtggagctctgggaacgttttggctattacggcgttcaggggatcctggcggtcttctttgttaaacagctgggcttctctcaagaacaggcctttatcaccttcggcgccttcgcggcgctggtttacgggctgatctccatcggcggctacgtgggcgaccatttgctggggaccaaacgcacgctggtgctcggcgccattgtgctggctatcggctactttatgaccgggatgtcgctgctgaaaccgcaactgatctttatcgctctcggcaccatcgccgtcggcaacggtttgtttaaagccaacccggcgagcctgctctccaaatgctatccgccgaaggatgcccgtctcgacggggcatttaccctgttctatatgtcgataaacatcggttcgctgctgtcgctgtcgctggcgccggtgatcgccgaaaaatttggctacgcggtaacctataacctgtgcggcgcggggctgattatcgcgctgctggtctacttcgcctgccgcgggatggtgaaagatattggctccgagccggatcatcgccccctcagcctacgcaatctggcgctggtgctggccggtacggtggtaatgatttttctctgcgcctggctgatgcataacgtgatgatcgccaacctggtgctgattgttctgtcggtcgtggttattgcgttctttttccgtgaggcgtttcgcctcgataaaactggacgcaacaaaatgttcgtcgcctttattctgatgatcgaggcggtgctgttttacattctgtatgcccagatgccgacctcgctgaacttcttcgccatcaacaacgtccatcatgagatccttggctttaccatcaacccggtcagcttccaggcgctgaatcccttctgggtagtggtcgccagcccggtgctggcggcgatctacacccatctcggtcataagggtaaagacctgaccatgccggtgaaatttaccctcgggatgttcctctgcgcgctgggcttcctgaccgccgcggcggccgggatgtggttcgccgacgcccaggggttaacctcgccgtggtttattgtgctggtctatctgttccagagtctgggggaactgttaatcagcgctctggggctggcgatggttgccgcgctggtgccgcagcatctgatgggctttattctggggatgtggtttctgacccaggccgccgctttcctgctgggcggctatgtggcgacctttaccgcggtgccggaaaacatcaccgacccgctgcagaccctgccggtctacaccaatgtgttcagtaaaattggcctggtgacgctgggcgtcacggtggtaatggcgctgatggtgccgtggctgaaccggatgattaataccccggccagcgccgaataaccgtttgagatggccgatccgctggcgccgtttgtttaaatattgcggttcccggctcgcgctacaatttggtagcccggataaggcgctttgcccgctatccgggtgatatcacaacggcgaaaaattacgccggcgtaccggcgtaaatatcaaaccgatgtcctttggtcaccaccgcgttcggcgtggcgacatccgccagcggcggcgcataatccgggcgcttgactaccactcgtttggtcgccaactgacgcgctggcgccaacagaccatcggcgtctaaatccggccccaccagcgactgaaagacgcgcatctctttcttcaccagcgcgcttttctgcttatgcgggaacatcggatcgaggtacaccacctgcgggcgcggggtgatatcggttaacgccgtcaggctggaggcgtggatcagctgcagccgctcctgcagccagccgccgatttccgcgtcagcatagccgcgcgccaggccatcatcgagcagcgcggcgaccaccggattacgctccagcatccgcacgcgacagccgaccgacgccagcacaaaggcatcgcgtcccagcccggccgtcgcatcgacgacatccggcaggtaatcgcctttaatacccaccgctttagccaccgcttcgccgcggccgccgccaaacttgcgccggtgggccatcgccccgccgacgaaatcgacgaagatgccgccaagcttgggctcatcgcgcttgcgtagctccagatgctccgtcgtcagcgccagcgccatcgggttatcgtcatcctgctccagcccccagcgggcggctaaaacagataaggcgccgtcaccggcgcctgtttcatcaattaagcagatcttcacgtagcaatcagcctttgatcccgtaatgctccagcatcgcgtccagctgcggctcacgcccgcggaagcgtttgaacagctccatcggctcttcggaaccgccgcggctcaggatattgtcgaggaacgactgaccggtttcacggttgaaaatcccctcttcttcgaagcgtgagaaggcgtctgccgccagcacgtcggcccacaggtagctgtagtagcctgccgcatagccgccagcgaagatgtggctgaaggcgtgcgggaagcggccccaggtcggccccggcaccacggcgacctgctttttaatctcggccagggtctcaaggattttcgctccctgctccggtttgtactccgcatgcaggcggaaatcgaacaggccgaactccagctggcgcagaataaacatcgccgcctggtagtttttcgccgccagcattttctccagcagctcctgcggcagcggttcaccggtttcataatggccggagataaacgccagcgcttccggctcccagcaccagttctccataaactggctcggcagctcgaccgcatcccacggcaccccgctgatgccggaaaccccggcggtgtcgatgcgggtcagcatatggtgcagaccgtggccgaactcgtggaacagggtgatcacttcgtcatgggtgaacagcgccggcttgccgttgaccgggcggttgaagttacaggtcaggtaggcgaccggcttctgcagggaaccatccagtttacgcatctggccgacgcagtcgtccatccacgcccccccgcgcttatgctcgcgggcatacaggtcgagatagaagctaccgcgcagctcgttgtgttcgtcatacagctcgaagaagcgcacttccggatgccacacatcgacatcggtacgctctttagcggtaataccgtaaatgcgcttaaccacttcaaacaggccgctaacggctttgttttccgggaaataggggcgcagctgctcatcgctgatgctgtagaggtgctgcttctgtttttcgctgtagtaggcaatgtcccacggctgcagctcatcgacgccaaactcggctttggcgaaggcgcgcagctgggccagctctttttcgccctgcggacgggcgcgttttgccaggtcggtgagaaagtcgagcacctgctgcggatccttcgccattttggtggcgagggatttatacgcatagctgtcaaagcccaacagctgcgccagctcgtgacgcagggcgaggatctccgccatcaccgggctgttatcccatttcccggcgttcgggccctgatcggaggcgcgggtggaataggcgcgatacatctcttcgcgcagcgcctggttatcgcagtaggtcatcaccggcagatagctcggaatatccagggtcagcagatacccttcctgctctttggcctgcgcctgagcctgagcggcggccagcgcgctttccggcatgccggccagatcggcgacatcggtcaccagcttgttccagcccatggtggcgtcgaggacgttgttgctgtactggttgcccagctcagagaggcgcgcggcgatttcaccgtagcgtttctgcgcctccggcggcaggccaatcccggataattcaaaatcgcgcagcgcgttatcaaccgcttttttctgcgcggtattcagcgtggcgtagttatcaccatcgcgcaggtcgcggtaggctttatacaggccttcatgctggccgacccaggtgctgtactcggagagcagcggcagcgtctgttcgtaggcctcacgcagttcagggctgtttttaaccgaattcagatggctgacaggcgagaagatgcgtcccagcacatcgtccacttccgccagcggctggcaaagattttcccagctatacggcgcgccatgcgccaccgcgctttccaccgcggcccggcaatcctccagcgctttggtgaccgcagggaccacgtgctctggtttgatcgcagaaaaaggcggcagggagaaaggcgtcaataatggattggtcatatgcgctgtcctgttgaaaagggtgaatgaagcgcgcgtccggcgcttatgcatgagatctagaatgggggatagttgggggaatttcaatgacgggcggtgcgtcagcctgggtattgctgcgataagtccgcccgttgccggaaaagcgcgacacgcagtgcagcgtgccggaaaccacattaatgccttttttgcgccatctcccaggccgccgacagattcagccgctgccagaattgctgttcgggggtggtgccggatagcgggtaacccgccggcagcgcggtgttgaccatcagcgcccgacgctgggccgctgacagatgcggcagggcatcttccagcagcacttccgccccctccggcacctgtaaacgcggctgcggacccttctgctgcggcagatcgtaggtcatggtgaagcgagagaaatcacgcatcgccggctcgcgccagggatcgtctttcacgctgctcttcgcgcactcggcaagcgatgtgccgcaggccttcgccagcgcggcgcgcagctgatcgcgggcttcgttaaataatacccggtagtgcggatcgttaagatagtgggccacgttgcgctcggccaccattcgcgagccgatcacgtccagcgggtagtggacgcccagcacgatgcgcgagtagccatagcgggcgccgcgcgccaccagcgcgtcgtagcgctccgggatcatcgccgccagcaacagcgcatcggtatagccggtgttggtgtggccgctggggaacgagccgccgtcggcggtgtagggctggttatctttcaccaccacatcgtcaggcaccaggtgaatggtgttgccctgcaccagaaacggccgcggattgttgaagtgctttttcgcctcgccggtgctgacctccgaggctttgatcaatgctgccgctttccccagcgcgccctggtcataggcggtcagaaacgctttgccaaggcgtggccccagcgcgtcgctgaggaagtagaggtagctaatgccttccgcatcggccagcgcctgacggcgcgtggtctgcacggcgtcgcgattgatggcggtcaccgtcgccagattctgcttcacgacggtctccggcagggtgctgaacgccgacagcagcgtaatgcccgcctgctggttggcccgggtctggaagtcatagccgctggccttcagccaggcggtatcggcctgagtttggttttgtttggcgtgcgccagccgatcgcgggtcagcgcggcggcatccccctgcagagcgtggcgtagctgcgccagcgcctgttgctcaagatcgtcatacgcctggctggaggcagccggcgtcacgctattggcgagggccgccgccctgttcagcgggatgtctttagccagaaccggttgcgccagcagcagcgcgacggccagcagcgagagttgccttttcattatttttccttttattcaaataattaccttgcctgtacccgacgctagcgcggccgtttgacgtttttatgacagcgttatgttttgcaacgcttttagcagaaatgaaacagcgcggcggcgcagcggtaatctcggccgatctgcggtaaactatcggttaacttgtttacttcccggaatctctgcatccatgctcagttatcgccacagctttcacgcaggcaaccacgccgacgtcctcaaacacaccgttcagagcctgatcattgaatcactgaaagagaaagaaaaaccgtttctctacctggacactcacgccggcgcgggccgctatcagctgagcggcgagcacgccgaacgtaccggcgagtatcttgaaggcatcgcccgcatctggcagcaggacgacctgccggcagagctggagccgtatatttcggtcgtagaacacttcaaccgtaacggccagctgcgctactacccgggctcgccgctgattgcccgccagctgctgcgcgagcaggacagcctgcagatgaccgagctgcacccgagcgacttcccgctgctgcgcgctgaattccagaaagacagccgcgcgcgcgtcgataaagccgatggctaccagcagctgaaagccaagctgccgccggtatcgcgccgcggtttgattctgatcgacccgccgtacgaaattaaaaccgactatcaggcggtggtcaccgggattaacgaaggctacaaacgcttcgccaccggcacctacgccctgtggtacccggtggtgctgcgcgcgcaaatcaaacgcatgatcaaagagttagaagccaccggcattcgcaaaatcctgcagattgagctggcggtgcgtccggacagcgaccagcgcggcatgaccgcctccgggatgatcgtcatcaacccgccgtggaagctggagcagcagatgaataacgtgctgccgtggctgcacagcaaactggttccgaccggcaccggccacgccaccgtcagctggatcgtaccggagtaatcgcaaccatcggtggaaccttttaagcctcgcgctacaatcgcggcaatcaacgattaaggacatatgggcatgagcaaacattatgattacctcgccatcggcggcggtagcggcggtatcgcctcaattaaccgcgcggccatgtacggccagaagtgcgcgctgattgaagccaaagagctgggcggcacctgcgtcaacgtcggctgcgtgccgaaaaaggtgatgtggcatgcggcgcagatccgcgaagcgattcatctttacggcccggactacggtttcgataccaccatcaaccattttgactgggagaagctggtcgccagccgtagcgcctatatcgaccgtattcatacctcttacgacaacgtactgggtaagaatagagtcgacgtgatcaaaggcttcgcgcgctttgtcgatgcccacaccgtggaagtcaacggcgagatcatcaccgctgaccatatcctgatcgccaccggcggccggccgagccacccggatattccgggcgtcgaatacggtattgattccgacggtttcttcgaactgccggcgctgccgaagcgcgtggcggtggtcggcgcaggctatatcgccgttgagctggcgggggtgattaacggcctcggcgccgaaacccacctgttcgtgcgcaaacacgcgccgctgcgcagtttcgatccgctgatcgttgagaccctggtggaagtgatgaacgccgaaggcccgcagctgcataccaatgcgatcccgaaagcggtggtgaagaatgccgacggcagcctgacgctggagctggaagatggccgcagccagaccgttgactgcctgatctgggcgattggccgcgaaccggcgaccgacaacttcaatctggcggcaacgggcgttaaaaccaacgataaagggtacatcatcgttgataaattccagaacaccaacgtgccgggcatctacgcggtgggcgataataccggcgccgttgagctgacgccggtcgccgtggccgcaggccgtcgtctctccgagcgcctgtttaacaacaaaccggaagagcatctggactacagcaacatcccgaccgtggtcttcagccatccgccaatcggcaccgtcggcttaaccgagccgcaggcgcgcgagcagtacggcgacgatgccgtgaaggtctacaaatcttccttcaccgcgatgtataccgccgtgacctctcaccgtcagccgtgccgcatgaagctggtgtgcgtcggcccggaagagaagattgtcggcatccacggcatcggcttcgggatggatgagatgctgcagggctttgcggtggccctgaagatgggcgccaccaaaaaagacttcgacaacaccgtcgccattcacccgacggcggcagaagagttcgtcaccatgcgctaagacgcgatcgccggatgataaaaagaagcccccaggggcttctttttttatgctcaggccacgccgttattgccatggcgcataaacgccgggcgctgattgagcgccatataccagcgctccacggctggcatctccggatgggcgaaaggggtcattttccagcgatgcaccgacagccccagcacgatatcggccagggtgaagcgctcgccggctacccacgccccggtacgctgcagctgcgcttcaacaatgcgcacgcagtgggtccaggcggcaatactctctttaatcgccaccggatcctgaaagcgcggatctttacgcaccagccccataaaagcatggcgccaggcagtgttaaactcggtcgcctgccagtccatccagtgctccacctcggcggcgggctgcggctcggcgggcagcagatcccagcgctccgctttgcgcgccagatagcggcagatactgttcgactcccagagcacgaagtcatcgtccagtagcaccggcaccaggctgttaggattcagacgctgaaactcaggcgtatccaggggcttaaatccgctgccgtaatcttcctgctggtacgccagcccggcttcctcgcaggtccacagcactttccgtacattaattgaagagcgtttacccagaattgttagcatcgtcagcgattcctcagccataaaagacagttcattcactctactctattgccagccagcaacaaggcagagcgctggataatgtgtatagttgattccagcctgtttgccgaaaaggaacccgacatgttgaccccttttaccgttttgatgcctgcaaatattcgttttggccgtggtcaggccgagagcgccgccccctggctggcgcaacagggcggcccaatcctgctggtgcatggcgccagcccgcagcgggcggcgtttctccgccagcagctggaggcgctgcagcttgcggtcacgacgctggcgataagtcgcgaaccctggcttagcgatatcgagcagggcgtccagctggcgcgcgagaaagggatcagagcggtggtcagcctcggcggcggcgcggtgattgacgccggtaaggcgattgcggcgctggtccccgccgccggcccggtgatcgactatctggaggtggtgggaacgggccgtcagctggaagccagtcccctgccgttcgtggcgatccccaccaccgctggcacgggcgcggaggtcaccaaaaatgcggtgatcaacgttccggaacagcagcggaaagtgagcctgcgcgacgaccgaatgctgcctgacctggcgattgtcgacccggcgctaaccgacaacgcgccgcggagcatcaccctgagctccggcctcgacgccctgacccaggtgatcgagccctggctctgcagccgggccactcccttcaccgatgctctctgccagcaggcgatcccgcggggaattcgcgcgctaaaaatcctgatggaacaagagtgtccggccagccgcgacgagatggcctgggtcagcctgtgcggcggactggcgctggcgaacgccgggctgggggtgatccacggcctcgccggcccgctgggcggcctgagccgcgcctcgcacggcgccctatgcggcagtttgttgccgtttggcctggcgctcaatgagtcgcagatcaacgaccctggcctgcgccagcgcgttaacgatgtccgccgctggctggccgacgggctggacgtccctgtggatcaggtctgggacagtctgcgggaatggagccatcgcgctggccttggcaccctgcgcgacctcggcgtagcgcgcgatgcgctggaaccggcggcgctggccgccagcacctcctcatcgatgaaggccaacccggtcagcctgagcggcgaacagctgctggagatgctggaggcggcgtgggagtgagcgccccgggataaaattttgttgcataatgaatgctccgaatttcatctgcgccaggatgtacaatttttaattacttatcaacagcgtactttgaaatggcagcttttcttctcggcggaaaagcgtgatctcacgcacagtttgcttcacactcaccgaagcgactgtctacgcttaatagacaaggccgggtatgcccggccccgaactcacgctatccggaggtccgtatcgctatgttcagccagaaattacgccacgttgaagacgacgagttaaggatcgacatcgatccctgctacgaagccgatccgtacgaattaaagctggatgagatgatagacgctgaaccggagcctgaggtgatcgaggggcttccggcgtccgatgccctcaccccggcggatcgctatcttgagctgtttaccaacgtgcagaaatcacgcattttcgcggacagcaaaaccttccccgactgcgcgccgaaacacgatccgctggacatcctgcggaactaccgcaaggtcaaacgccagcccgacttcgatctgcggcagttcgttgaggacaacttctggctgccggagagccagagcgacatctatatctccgaccccagcctgaccctgaaagaacacatcgacaagctgtggccggtgctgacccgcgagcctcaggatcatatcccgtggtcatcgctactggcgctgccgcaggcctacatcgtgcccggcggtcgctttagcgaaacctattactgggactcttatttcaccatgctggggctggcggagagcggccgggaagatttgctgaaatgcatggccgataactttgcctggctgattgaaacctacggccacattccgaacggcaaccgcacctactacctcagccgctcgcagccgccggtgttcgccctgatggtcgaactctttgaagaggatggcgtgcgcggcgcgaagcgctatctggaccatctgaagatggagcacgccttctggatggacggcgccgagtcgttgatcccgcaccaggcgtatcgccacgtggtgcgtatgccggatggctccctgctcaatcgctactgggacgaccgtgacacgccgcgggatgagtcgtggcgcgaagacgtggagaccgcccgacactccgggcggcccgccaatgaagtgtaccgcgacctgcgggcgggcgccgcgtccggctgggactactccagccgctggctgcgggatatcacgcggctggccagcatccgcacgacgcagtttatccccatcgacctgaacgccttcctgttcaagctggagacgaccattgccaacctctccggcctgaagggcgatcgcgagacggaggcggccttccgccagaaggcccaggatcggcgggcggcggtcaaccactatctgtgggatgatgagaacggctgtttccgcgattatgactggcgccgtgaacagctggcgctgttttccgcagccagtatcgtcaccctttacgtcggcctggcgacccacgaacaggcagaacgccttgccgatgcggtgcgggcccgcctgctcacccccggggggatcatggccaccgaatacgaaagcggtgagcagtgggataaacccaacggctgggcgccgctgcagtggatggcgatccagggatttaaacgttacggccaggatccgctgggagatgagattgcctggagctggctgcagacggtcaaccacttttacaagcagcatcacaagctgattgaaaaataccatattgccaccggcgtcccccatgagggcggcggcggggagtatcccctgcaggatggctttggctggaccaacggcgtggtgcgccgactgattggcctgtacggtgagccaacctagtcgggctgttcccggcggctttctcctgctatgttcagaggattcgccctgcccggaacgacgcttatgcctgaacttctgacgccgcgcctgcgctgctcaccgctgcagctggacgactggtcgttttttctttccctgcagcaggatccgcaggtcatgctctacgtcgccgatccccgaccgcaggcggccatccgcgaggcgttcgattcgcggctgccgccgtggacgcccggggatgaacactggctgtgcctggtggtgcgcgacaggctgacccataccccgctcggcctgaccggctaccagcatcatcagcgcgacattgccgaggttggctttctcttcgccccggcggcgcagggtcggggctacggctacgaatcgctgcgcgcgctgtgcgactacgcctttaccaccggcggcgtccgccgcctgaccgccagcgtcaccgccggcaacgaggcgtctaagcagttactgctcaaagccggcttccggctggagggagagctgcgggaaaactactggctcaacggacgctggcacaacgactggctgttcggtcggctgcgtggggagggcgatgcgccgtagcgcaccgccggtcacaggctgggggcagtcaggatcagaggaacatcccgcccgagacttccacacgctgcgcgttcatccacgccagctcatcgctgagcagggcggcgatggcgtcgccgatatcatccggcagcccaacgcgccccagcgcagtctgggcggcgatatgccgattcacctcggcgttatcgcgcacctccccgccgccaaagtcggtctcaatggcccccggcgcgatgatgttcaccgatatcccccgtccgcccagctctttcgcctgatagcgggtcagaacctccatcgcccccttcatcgcggcgtaggccgcatagcccggcagggcaaagcgcgccaggccgctggagacattgaggatacgccccccatcctgcaggagaggcagtagacgctgggtcaggaaaaacggccctttgaactggatattcatcagctcgtcaaactgcgcttcgctggtctcggcgaagggcgcgttgagtccgatcccggcattgttcagtaaataatcaaaggttgtgcgtccccacttctgcgccagcacctgcgccacctcgctggcgaatgcgtcaaatgttgtggaatcgccgacgttcagcgctaatgctgccgctttgacccctttttgctctatttccgccaccacgtcgagggccgcctggcggttgctgtgataggtcaaaagaatatcggttccctttgccgccagcttcaacgcggcgtttttacccagaccgcggctgccgccggtcactaaagcgatacgttgtgtcatcagaagacccctttcaggttgcgttgtgattgtgttgtagcttattaactgctcatgcaacaataaatacgctacattgcgttttactgtttcattaacaacaacaataggcgatcggcatggataaaattcatgcaatgcagttattcattcgcgtagcggatctggagagcttctcccgcgccgccgaaaccctggcgctacctaagggtagcgtctcgcgacagattcaggccctggaaagccatcttggcgtgcggctcctgcaccgcaccacccgccgggtccagctcacccaggatgggatggtctactacgagcgggcgaaagatctgctgagcaacctcgacgaactggacggcatgttccagcacgatccggcgagcatcagcggccggctgcgggtggatatgccggtcggttttgctaaaaaaatggtgatcccgcatctgccgacttttttacagcaatatccgggcatcgaactggagctgagcagcagcgatcggcaggtggacgtgatccgcgaggggtttgactgcgtggtgcgcgtcggcgcgctcaaagactcagggctgattgcccgcccgctgggcaagctgacgcaaattaactgcgccagcccggactatctggcgcgttttggctatccgcaatccctggaggatctggcggatcatgccctgatccactacgccagcaccctcggggtccgtccccccggctttgaggtaatgatcgacggcgcggtgcgctgggtaaaaaccggcggcatattgacggtcaacagtacggaaacctatcaggcagcctgtatcgccgggctggggattattcaggtgccacgcaccggcgtgcgcgaggcgttacgcgccggcgacctgattgagatcctgccccagtaccgcgccgagccgctgccggtctcgctgatctacccgcaccggcgcaatctctcccgccgggtaaatctgtttatggagtggctgggcggactgatgaaagcgtatgtcgattgagcggcgcggccggaaaacgggcggcggggagaggcattcctgcaggatacggcatttaaggtatactttttgctgaatctcgctgtaaaaaaggaagaaattacgtatgacgccggaaaacgacgatcgacgcccgccacaggaaccggatacgcagccggagaaaagcaaaagcacgctcgaggcccttaatgacaccgccgtcgggcaaaaagccagccaggcgctgaagaccgtcaccggaacggcggccaaagtgcagcgcaacccggtgatcgcccatctgctgcgcgccgcagagcgcttcaatgaccggctcggcaatcagtttggggcggctatcacctatttctcgttcctgtcgatgatcccgatcctgatggtctcctttgccgccgccggcttcgtgctggcctggcacccaaccctgctgcaggacattttcgacaaaattctgcaaaacgtcagcgacccaacgctggcggccacgttgaaaaacaccatcaacaccgcggtgcaacagcgcaccgccgtcggtctggtcggcctgctggtcgccctctattccggtattaactggatgggcaacctgcgcgaagcgatccgcgctcaatcgcgcgacgtctgggagcgccggccgcaggacgaggagaaaatctgggtaaagtacttccgcgatcttatctcgctgatcggtctgctggtggcgctgattattacgctgtcgatcacctccgtcgccggctccgcccagcagatgattatctccgcgctgtatctcgacaacattgaatggctgaaacccgcctggcggctaatcggcctcgccatctcgatttttgccaactatctgctctttttctggattttctggcgcctgccacgccatcgtccgcggcgcaaggccctgtttcgcggcacgcttatcgcggcgattggctttgaaatcataaaaatcgtcatgacctggacactgccggcgctggtgaaatccccctccggggcggcgttcggatcggtgctggggctgatggcctttttctatttcttcgcccgcctgacgctattctgcgccgcgtggatcgccaccgcggagtataaagacgaccggcggatgccgggcaaaacccaccgctgaggtattgcgaggatgaataaaagaggcaaaattcatcctcgcgcttgatttcagcagataaatccagcatgtaacttttatttaactcaaaactggttttattctctatctttttaattgtgtgaagcatttcatagaactatttttactggtgtaaaaattatccgctttttgcctcttttttgcccattttccgcgtttgttacagattgaaatgtccctgtggctgtggctatatggcttttcgttcgcgcaaaaataagaaagatctatgcaagccacagccaccactctcgaaaacacgcaggaaaccgccccggtcaactcacgcaacaaggttgttgtcgcctcgctcattggcaccgccattgagtttttcgacttctacatctatgccaccgccgcggtcatcgtcttcccgcatatctttttcccgcagggcgatgccgctgcggccaccctgcagtcgctggccaccttcgccatcgccttcgtcgcccggccgatcggctccgcgctgtttggccacttcggcgatcgcgtcggccggaaggtcaccctcgtggcctcgctgttaaccatggggatctccaccgtggtgatcggcctgctgcccggctatgaaagcattggcattgtcgcgccgatgctgctggcgctggcgcgtttcggtcagggccttggcctcggcggggaatggggcggcgcagcgctgctggctacggaaaacgccccggcgcgcaagcgcgccctgtacggctccttcccgcagctgggcgcgccgatcggcttcttcttcgccaacggcaccttcctgctgctctcctggctgctgaccgaccagcagtttatggagtggggctggcgcgtgccgtttatcttctctgcggtgctggtgatcatcggtctgtatgttcgcgtctcgctgcatgagaccccggtcttcgccaaagtggcggcggcgaaaaaacaggtcaaaatcccgctgggtaccctgttgaccaaacacgtccgggtgacggtgctgggcaccttcatcatgctggccacttataccctgttctacatcatgaccgtctactcgatgaccttcagcaccggcgcggcgccgaatggcctgggtctgccgcgtaacgaagtgctgtggatgctgatgatggcggtgattggctttggcgtaatggtgcctgtcgccggcctgctggcggacgcttttggtcgtcgcaagagcatgattatcatcaccacgatgattattttgttcgccctgttcgcctttaaaccgctgctgggctccggcaatccgctgctggtcttcgccttcctgctgctgggcttaagcctgatgggactgacctttggcccgatgggcgcgctgctcccggagctgttcccgacggaagtgcgctacaccggcgcgtcgttctcctataacgtgtcgtcgatcctcggcgcttcggtcgcgccgtacattgccgcctggctgcagggtaactacggtctcgcggcggtcggcacctatctggcggcgatggcggcgctgacgctgatcgccctgctgctgacccacgagacccgccaccagtcgttgtgatccttcgccctgacgcccccggcgtcagggctctcctctactttttcatctgcgacaaaatggtccgacactggttgctatcgccctccgccggggagatcagcgccagcagcgcggcggccggcgtcaccagggttgccagcgccgccgctaccgcgccgcggacaatcagcggcccggccttcacccccgcctgcggcgatttaaaggtgccccggacatacagcggggaacgcagggtgatcacccgaaagcctttgctttccggatcgatggtcaggtccagctgctcggaggcgaagctggcggtcccggtcacattgatcagcgcgttttctgtatcgaaggcaaaaatctgcggccgggcgacgccgttggttacgtcgatattggccgcagcgcagtttacccgaacctcctcatcgccaaaaatctggccgatcaggtagttaccgacgttaagaccgaggatttccatcaggttgcgactgatcagtccgtcgttcatcagcagcttcaggttaccgttgctgttgccgagcagggccgccaccgagttgccgctgccgcgcagctggacgtcgccattcatctcgccgagggttttctgcatcatctcgacgtttggcatcagcgccttcagcttcaggcgtcgcgcctgcagattggcctcaccctgcagcggctttttatcgccctgcaggtgtacgctgccggcaatcgacccgttggccaggccaaagcgcaccggctgcaggcgcaggtcaccatcctccagaatcacatgggtcgacagatcgctgatcggcagggtgccgccgtgctcaattctccggcccttaaagcgcacatcggcatccatcacctgccacttgtcggtttcaaagcggtccgccggcagcactttacccgccggctgcggccggtcccccgcctggcgcgaagcgcttttcttcgtccctttgccggaatcgacgccgattaatggcccgaggtccgccagacgcagctgcttcgactccatatcgccgctgagtttcggccgcggcttgccggtggtgtaggtcagggagccatgaatgtcgctatcgccgattcggccgttaaaattctgatagttaaagcgcatgcggtttttttgcgtaaagtcggcgcgcaggcggccgtcggtggagaatgacggcgtctccggcagcagcacgccggtcaggtcgtagagatcgcgcagcgagtcgccggcgaattttagccgcaggtcaatgccgccgacgttgagcgggtcgctgaccgtgccgctgaacgctacccgggtgttaccggagtggaagtcgccctgcaatgggaagggggcgcttgcgctgcgcagggccagcatgccgccgattttcccgttgccggtgaccggctggcccttgtagcggcccttcagcgacagaccaaagacatagtcgcctggtttcgccgcgctatggcgatcctttgtgccggtcacttcgctgaacggcagcggtttgccgaggggatcgacgaggatggtgatatcgctgcgggtgatcttgtcgtcaatggcgatagtcccgcgatcaaagagaatattatcgaggcgaaaggaccagctggagggcgcgctgtcgcccgaagtacgcttatcgcccgccagctgaaaggtccagttattgttgtcttccgcaaggcggatcaaccgtacgtcgggctgctccagcttgatccacggcaggtacaccgttttgctcagcagcgccagcggggcaagggtcgcctccacccgcggcagatggatcatggtcacctggggaatggccggcgggttgcccagcacgatatcctccgcgtgtacgtggggccacgggatccagctgcgccagccgcgctcgtccggctgccgctcccagaccacgccgagatcgccgcggatggcgaacgggcggttaagttcggcggacactttctgattgatcgtcggcttcagccggttccagtcaaaggtggccagcacgataaagaaaagaacgatcagcaatagtatcgttcctgtgatgataaccaacgttttacgggttctgctcatccctactccgctccttttgcatcacgtcagtcctgaatatagtcaaaaagcggcgtttatcctggaaatgcgcttttcgtcacattacgcgcgtcaggtcaaaaaaataatggaacgatgttttaatatgattgaccagcaaaacagcgcagcgcacactagcgcttatatcgattccattgcaggttctggctatgtctaaaaaaattgccgttattggcgaatgcatgattgagctgtcagagaaaaacggggccgttaaccgcggctttggcggcgataccttaaacacctcggtctatatcgcgcggcagacggatgccagcgcattgagcgtccactacgtcaccgccctgggaaccgatgcgttcagccagcagatgctcgacagctggcaacaggaaaacgtcaacaccgatcttatccagcggatggccgaccgcctgccgggactgtattacattgaaaccgatgacaccggcgagcgcaccttctactactggcgcaacgaggcggcggcaaagttctggctggagagcgatcgcgcggcggcgatttgcgaagagctggccactttcgactatctctatctgagcggcatcagtctcgccattctcagcccggccagccgcgacaagctgttcacgctgctgcgtgagtgccgcgccaacggtggcaaggtgatcttcgacaacaactatcgtccgcgcctgtgggccagccaggcggaaacgcagcaggtctatcaggagatgctcgcctgcaccgatatcgcgtttctgaccctcgatgatgaagacgcgctgtggggagaaaaaccggttgctgaggtgatcgcccgcacgcacgccgccggcgtggaagaggtggtggtgaagcgcggcgcggatgcctgcctggtctcggttagcgggcaaccgctgcgggaagtgccggccgtcaggctggccaaagagaaggtggtggataccaccgccgccggagactccttcagcgccggctacctggccgttcgcctgaccggcggcgatgccgaatccgccgccagacgcggacacctgaccgccagcacggtgatccagtatcgcggggcgatcatcccgcgggaagcgatgccgcagtaattctccgcacaaagcgctctccggccgccgctggcgcgccggagaggcgttaggttactgccccggcgggatgtcgctggcctcgctgtgggcgtcaaccgtatcggcgctgccgctagccgccgtggccgccggattcggcgccatcagtttttcccaggtggcctgcagctccttcatattgtattccggttcgcccttcggctgttgcagcaccagcgccatgtcctgcgagagctgctggcgcagatactggttcagcatgtccaccgtcagggagttgaggaactcctgacgcagcttctggtactgctccggcgcgatgtccaccacctgattctgcagggagcgcatgcgctggctcatcagaatgtcggtgtcagtgcgcgcataggtggcaaacagcttctgcagctcgaggcttttctgggcgataagcgcgtcaaactcctcctgaggcagcccgttgtcccgcactttcgccagctcgcgcgaaaccacgctcaggttgttgttcaggcgctcgcccggggaatcgatgttgatggcgcactgcgcgcgctgatatagcacccggcagtcaaagccaaggccaatatccttcacgttatttttgctcagactctgctgcacgtgccagaacagcgcttcacgggcgagatcgtcacgccagtagcgctgcagcgccgcggagtcgcggatcggctgccatggcgcatcccacatgatggacagtttgtcctgacgcaccgcgttggtcatgatgctgaccggtacggtaggcagcggcgataaggtcggcaccgctgcgggggtttcccgcttgcccttcagatcgccaaaggtcttattgatttgctcggcaacgctgcggctgtcgacattccccaccacgatcagcgtcatggcgtcgggggtgtaccatttttgataaaagtctttcagctgagccacgtcgatcggctgcttcagcggcgcggcggggtcatggcccagcatggtggaccctttcaggcgatagcgccaccaaccctctttggtatccagtggccaggtcgccaccatgtcgctgccctgcagcgcatgattgatcgattcaggcgtaatggccagtttaccgctggcgtccgccagccagctcagcgcctctttcaacagatcgttgcggttattgggcaggctgagattaaacatcgtgtaatcgtaggagacgatggccggcggcagaggacgcttcgggtcaatactctgctgccataaagagcgcgcctgcatcgtcggcaggctgccgctttgcgtcaacgccaggcggggaataaagcggctgaaaccgctctgctgagtgctttcgctcagcgagccaatattgacggacaaacggacttcgatacggtcgctgggacgttgcggcgtggccaatacctgccacgacaaaccattcgctaaggtcccttgttgccaggccggatcaggctggagcgcttctgcctgcacataaccggccgccgctaccatcagcaaaccgcccgttaagagtttaattgttgtgccctgcatgtgaacccctgatgaacattcctggttacaacagcaccccactgacgggctgccgaaaaaagtgagagtgaaatacgtcggttagaccacacggagacgaaaatgtcgcatgacaacgtaaaataatcatttcgtgtcattcccgccgggcgggaatgacctctaattatgcgcaggaggccgtactccagcaagggagtacgggcctaagaggaggatttaagaggataattcgtgcgttttgttcgccggaacacggttattcagaacgtcatccatctgtttggcatccagttctttcacccatttcgccaccaccaccgtggcaacgccgttacccaccaggttagtcagcgcgcgggcttcggacataaagcggtcgataccgaggatcagcgccagaccagccaccggtaaatgaccgacggccgagatggtcgccgccagcacgatgaagccgctgccggtcacccctgccgcccctttcgaggagagcagcagcaccaccagcagggtgatctgatggaaaatatccatatggctgttggtcgcctgggcgataaagactgcggccatcgtcagatagatagaggtgccatcgaggttgaacgaatagccggtcgggatcaccaggcctaccaccgatttacggcagcccagcttctccatcttgtcgagcattctcggcagcgccgattctgatgaggaggtccccagcacaatcagcagctcttcccggatatagcggataaatttgaagatgctgaagccggtggcccgggcgatgctccccagcaccaccaccacgaacaggatacaagtgatatagaagcaaataatcagctgccccagctgcaccagggtgccgacgccatatttaccgatggtaaaggccatggctccgaaggcgccgatcggcgccaggcgcatgatcatattgataatgccgaagataacctgggagaagctttcaatgacgttgaaaatcagctgacccttgctgcccagacggtgcagggcaaaaccaaacaggacggcgaacagcagaacctgcagaatgttgccgctggcgaaggcgccaatgacgctgcccgggatcacatccagtaaaaaggccactaccccttgatctttagcctgctcagcgtacaccgccaccgctttcgcatcgagcgtcgacgggtcgacgttcatcccggcgccgggctgcaccacgttgacgataatcagaccgataatcagcgcgatggtgctgaccacttcgaaatagagcagcgccaccgccccggtacggccgacggctttcatgctttccatcccggcgatccccgtcacgacggtacagaagataaccggagcaatcaccattttaatcagcttaacgaaggcgtcgccgaagggtttcatttgcgcgcccagttccgggtaaaaatggcccagcagaataccgatcgctatggccgtcagcacctggacatagaggcttttaaagatagaggttttcatagggtgtcctttgggaataaccacagagcaagaagggatatttgacgtctgtggcttaaaaataacaccctggaaacatttcagaaataactaacgccgaaagtgcaacgcaattgttaaaatctttgagctgactcgcacaagtcaacaaaacatttacaaatttacatcctcccgggccggggagagatagcgcgcgctgaatgcctcctgcggtaaagcgcaaccgaacagatggccctggagcacctcgacgcccgcggcttgcaaccagcggcgctgggcgtcgttctccaccccttccgccacgatacgcagcgacaggccgcgcgcgagctggatcatcgccggcaccatgctgacatcctccggcagcatatcgatgaataccttatcaattttcagaatatccaccggcagggccttcatctgctgcagctggtgcaacccggcataacccatgccaaaatcatccagcgcaatctgtaccccggcctcgcgcagcggtcgcaaccgggccatcacatcctgcggatcgtccatccggcagctctccgtcacctcgaggatgagggtgcccggggcgatgcggtagcgggcgatcagctttagcatctcctcgccgcggtcgtgttccagcagctggagcagggaaacattgaccgacagcggcagcataatcccctggctttgccaggccgccagctggcggcaggcctcttccatcacccagtagccgaccgggataatcagcccgcaggactcaatgcgctcaatcagcgacggcggtagcgaccagctgccatccgcctgccgctgacgcagcagtacctcggcgccgcagatctcgccgctggcgcaggccacctgcggctgcagccagatcgcgaactgctggttatcgagcgcggtcataatgtcgtgctcttccatcaggcggcgctgagccttttccatctgctcgggatcgaagaactcgatctggtttttgcctttacgtcgtgcggtgacggcggccgacaccgcgcgccggtaaaactgctcggcgctgagcccggcgtggaacatggcgatcccgacgctggcgtaggggcgcagctgcagcccatgcagcggtaaacgctcattaataatagtgagcacttgcttacttaacgttaccgcctgccacggttcggcgaggccatcggcgagaatcgcgaagtcatacccgctcacctgagccagcaccatctgcggcgggatcgcggcccgcagcttctccaccagcgtcaggagcagcatttcgcgctgactctccttgaggaccccggcggcgtcctgcagggtttcacaggcgacgacgatcagcgcggcgctctgcgggcgggccaccgtctgctccagcatcgccagcaaaaaggctttattcggcagctcggagaccgggaagcgggtcgactggatggacagctcatcatgctggcggaccaggctctgctggttgcggttatagctacgcaccagcataccgatctcgtcgtcatggtgcaggcgcgggagggtcagctgatggccaagacgctcctgctgggagagatcgttcagctcgcgggcgatacgccgcagagggcgaaccatcagccggttgatgcaccaggtgagcgccaccgtcagcatcagcaccagaagtaagtaagcagtcactaacgtagcaagggcgctcatgacgaatttatacatgcgataggagtcggcctgcagcaccagataggccagcggctgcgggttggccggtcgctccagcgaataaatgggcagcgaaatctgcaccggcagctcaaacagccgggtgacggttaccggcaccggccgctcggggataaatcgcatccgcagcgcctggaactggttcggcaataccacatccgcccggctgacgatgccagcaggctggatacggcttaaaatggcttccgcttccggaatatcggctttcagaatagccgcagacagcggttcgcgaacggatcgcgcgatactttctaactgcgtggccgtggtaaagcgactctgttgcacaaagtgaaacagcaaaatagtgcaaaaaaccaatacaaaggccatggacacgctcgcgaccatcgccatctgtttgattgtaagtgaacggctgacgcgcaacggtgttctccactgatactgaatacatacccggtatcaatccttcaatcccggtcgtttcaggctgattatatacttaaatccttcgcccacgcccgcgagggatgaagtgacgggatatttccgcgcggtggcgcggacgccgggatacatccccgacggccaacggtgggcaacgcctcacgagtatacgcgaagcgcgtcgcggagtggcgctctgtaacgtaattcagcctattctgctaccagtcggcgtagggcaccagcggctggggcggcatatccagatccccctgccagccggccgccgagtagcggacgtaaagcagcgcatggctcggggtgtaatccttcgcctgctgaatatcgaccgcggcgccgacgaaccagttgctggtcacccgccgctccaccagcgctctggcggtgtaaccgaatccatggctgctgcttccctcctccgtcagctcgctggcgcgctgccggtagtcggacgggatcaggttcagcagcggatagcgggcttgcgtctgggtgcgcgaatgggaccatgacaccgacccgccgagctcccaggaccagttctcggtgcgctgacgccaggtcaccggcacggcgaacgagagatactcctgtgggctgtaatagccgccctggccgagggtgtagccgctgagatctttgtcgtagtgccagatcatattgttgaggccgacggtgacgcgacgattattctcgttgatgaccttgtagtagtacccggtcatccagcgcacgcgccagttatccgccacgtttttaccagtcagcgagtcggcgcccagcgaggaccagatgccgtgagcctccccgcgatcgtagctcaggctcaggccgccgccgtcggcgcggacgccgccccaggtggcgccggtatggctgctgctgtccttctgcccgccaaaggagagcagcgagctggagataggccgccggtggacgttgaccgtgtaccccaccggcccgacgtcgctgctgtagctcagcccccccaccacatcgacgacattgaagcccatcggcgtggtgccgatatccccgctccaggtgtcattcttccagccgaccgccacgctggccccgctgtcggtctgatttttactgccgctggtacaggcgatctccccgcaggtgccccagctgggcgagtagctcccgtcgctgtgggtggaaaagctgccggcatccatattgaccaggtcggtgcggaagaacatccggccatccgccagcggagcatccacctgcagcatggtggtatgcgccttcaggtcggaatagccgccggtgccgctggaaccccagaagtcatgttccagggtgacgttcagatcctgctgacgataaaggtcggcggcatcgctgcggatcccgcgcttcagccagtcatcatggctgtcgttgcgcgtcagccgcgtaaaagtatcgttatcctgcggctgcgcgggggtaatgccggaggccaccatcgcttcccggtagtgcgtcagcgcctgctgcggcgccccgctctgggtggcaaagcgcgcggcatcgcgcagcaccagcgcgctctccatcgagggcggctgcgccttcgcctgcggcacaatctgattaaaaatccgttgcgcgtcagcggtatcgccaaggccagctcgcgccagcgccacccgccgctgcatgttcatggattcggtctctgcgcctttcagctgcatgacctgcgcccgggcggccggtttatcgccctcggccaggtagacttccgcaaggccgaggcgcgcatcgccgttgtcggcctcctgacgcagcacccgctgatagtcggcaatcgccgtctggctgtctccgcgctgctgcgcccagtcggccagcgtcagatcatagcgcaccgaggcgggctgccgtttgatgagggcgatcgcctgcgcttcgtcgccgctgtcgcgcagctggttggcctggcgcagcacccggtcgctttgcagacgcgcttcgagttcacgaatgttatccgtccacgcgctgcgcggcagagcggcgatttgcgccagagccagatcgtcctggtcgttccccgacaggtagagtcccgaggcgtagacccgttcggcgtcctgcggctggcggttgaccatcgtccgcatcagcgcgtcggcctcctggcgttcgccagcgctgaccagatcccgcgccagacggtaggttatccagacgctgtccggatccagcgccaggcgccgacgctgaacttccgccgcctgcgcccagttgccctggctctccagagcctgcgcctgtttctccagccggtcgttagtcaggctgcgctcaatatcatcgatactgcgccgctgagcgggagggaggccggcgatccaggcgctggctttctccggcgattcggcgcgatagaggttggccaggccgcgcaccgccaggttattgccgcgatccaggcgcaacgcctgctggtaatagcgctccgccgccgcctctttgcgcgccgccgcgacatcccccagccccagcacggcatagctgtcggtgcgatcgacccgctgcgcctgggcataatagttctgcgcctgcgaaagctggccggctttcagggcgttatccccctgctttatcagcagccagtagcggttagtttgcagcaggctgtcccacttgccgcggttcgggctgtcagggtccatggcaatcgctttactgagctgcgccactgcccgcgcgcggtcgccgcgctgggaataggcctggccgagagcgcccaccgcgtcgctgtcgcggctgtcggcctgaacggctttctgcagatccgcgaccgcctgcgtggtattcccggacttgaccgccgccagcccttccgagcgggcgcggaaagtcggatcctgcagctgcgcctgctgttggtcgagcagaacgcgggcgttcgccgccaccgagccggtgggaaactgcagaagaaattgctgcaacgcctgcacgctggccttactcaccggcatgcttttcacctcactgaaccacatatcggcggcgataccgcgtcccgaggccgatcgggccatctccgccagataggcgaacccctcctgcggtttgttatcggcgaacatctgcttcgccagcgaagtcagcaggctgacgttgcccggcgcgctggcgttcagttgtttcaactggctgacgccttcgctatggcgggccggcaggcgcgccaccagcgtccagtattcaatggcgacgtcaacgtcatccggcaccccgccgtacagtttttcataggcggcgatggcttcatcgaccttcccggccacgcccagcagtcgcgcctgctgcagcgcctggcggccctcgccggtgttgcttttcatctcattgcgcgacgccttcagctccggggagtccggcgccagcttcgtcagtcgttccagctctttttgcgccccggcggcatccccctgacgcagcagatagcgcatccgcgcggcaatcagctccgggttgttgggatcaatcagctccagacggtacagcgactggcgcaccaggtcttcacgattgctggcctcgccgaggcggacctgctccagcagatgctcctgggcaggcgtcgtcgccgcctgcgctaacggcagcagcgcaacgccgagggacagcgtgagtaaacttagtgagagcttgcgcattcctggttccagtcaggttgtaattcgccactcgccgtgaaacgaaaacggtgttgatcccaaccctggccgaacagcgtcagaactgcgctgtagtaggcatccgcgccgggatagttatcggcgacgcgctggcgttgcaccgaccgagcctcgtcgtcctgtaaaaacggcagcattgccgcggagaagcccactggcccctggccgctggttttgccggtggcgatattcactttctccgggggtaccccctgctccgtggtctgcgccgccatcggcgcgaagcgttgcagcagacgcgctttctgcttatcgccatcatggagcatgcccacccacaggtagacgcgaatcgcgtcatagctgccgatcggcggcttttcggttttcagctgccagcctttccctttctcatagcgcacccagtccggggtaaagcctttcggcgcggtctccagcagcaggcgcaggttactgtcgcgcagagcgggccacggcgcgccaaaacgcacaaagtaggtggccagctgcggcggaagatagctggggttaaaccgccagcctctgtcatcggcaaaaccgacttttcccggcagcagcatcgtgccgaggcccggcaccgccaccgtctcttcagcgacaatccgcgccagcagggctttaccggtctcggtgtactgcggctgttgccacaggcgccccgcctccagcagcgcccaggctatccacagatccgagtcggacgccgagttgctgtccagcagggtccactgctcatcgtcctttttgccccacagccagcccggcaaatgttgtttcagatcgccttccgccaggttgttctgcgtccaggtcagcagtttgtcgaaccctgcgcgatcgttggccgccagggcgaaaaacaggccatagctctgcccttcggaggtggagattttgcgcgcatcgctggggtcaatcacccgtccctcggggctgacgtacgcttgtttaaactgctcccaggcgggccactggcaggcggcgcccacctggcccgccgccagcagcagcgccgagagcaccgcgccacaaagtactttcatcatggtttactcatcatccaggctaagacggcggcggctgatgatgcgcagcatgcgccacagcacccatgccagcagcacaatgctgatggcggcgaagatcgccagcagtatcgggtggttagagagcgcgaaccagatgcgctcgaaccagggcagatgacccacgtagtaaatatcccccacccgcagactgttgacgccggattcgcggatcaccgccaccgagccaaacatcgctgcccgcttaccgctgtcgttgagggcgttggtcagcagttcatttccgcgcgggctgtcggccagcagggccaccacgctgcgctgatcgttatacggcgactggaagccaatcaccgccgccatcggcccggaagaggtaatgtcggtgcgggtattgggcgtgcgggcctcatcgtcgggataaatgctcgccaggtcatagtggcgcatcggcattttcacccagcttttggtcgcctcgaccagcaggttgattttggtgtcgtccttgagcgacgacgggatcgcgccgatcagcagcagatccgcatctttgttcttgatctggttgccatcgtcggtcatttgcagattaatcgccgccagaccggtctgcgaaccgatgccccccagcgcctgcagcagcgtcgccacctggccctgggtcggcgccttcggcaccaccaccagcgtgtcggaaaggtccgccatacggctgtaagggaagcccgcattggcgaagacgcgcaggtccggcaaggcgataaagtgataatacttcgagaagtcgatggtcgaatcgtcgccgatcaccacgtggttctgcaccggctggaaggtaatacagttgtcgatggagccgccgggcatcgggttcatatactggaagtcaaagcgcagctggttgaccgccccaagacgcagcgcggggatggtgacctccgatttgccgtccagcagcccctgcagcaccggcaggcgcaggatcagtttgttcacgtcctgggagctgttaaggctgaacgactgcaggaactggtcgttgaggctgatatccatccgcgagctgtccttcaccggcggcatggtgtagcggtatttcagatccatatcgatgccgttggcccgcagcagatagagatccggcggcaggttaagcgccacggtgatggcatccggcaccaggccgctggactgcagctgttgctcataggttttcagctcagcaaaggtgaccgaacggtcggtgcgcacccagttcggcgcgtcgtaaggctgacgcggctgcagggttttgatgccgtccacggtgacgctgctgccgcggaacagaatattgccctgagcaatccccttcgccgccagcagcaggtcgttatcatcgcggccgaaaatcaccagcagcttgacgtagggatcgttcgggttgtcgatcatttcgatggtcggcgccttgaccggcggatgatcgcgcaggaagtccggacgcttgtcgttggtggcgaagacaatggcgttacgatccggcagttcattgaaatagaccgggaactgctggccgcgccagccggccttgctgccgaaccaggaggcgactatcgccgccgcctgctgctgggtgaccgctggcgagcccgggaaaatcatcggcagcttcagcgggcggttatcgcgcggatcgtagaacggcaccgggaagtgtgacagatcgttatttaccttcagcgactggtaggtgagatccagatagctttcgcgtccgacgtccagccacagcgtgctgctggccgggttttcgcagacgtcgcggtagtggccgacaaactccagccgtacgcggttgaagtcggtgatgtacagcgggtcaatcggcagctgcgcgcggatctttttccccagctgctctttggtgacgggcaggacgcccatcagctcatcgttaagatagaccttcaactgcgactgcacgggcagcagcgagggcgatggggtgtattccagattgagcagcgcgttggcgaccagctcatcgctgcgcatgccgaattcgaccgacgcgtcaggccgtgagccgcgcagcacgatgctgccgggcggcggcgcgatggtggcaaagctcagcttcacctcccgctgcggcacgttctcggccaccgccgccggagcggtcggttcggcgagggtcgccgtcggctcgcccaccacgatcggcgcagccggggtcgcggcctgcggctgaacgccaggggcagcgttcgccaccgcggccggcgccgcataagaggccagtggataccagctgcacatgcccaccgctactgcacacatccaggaaagttttcttttcatcgcattatcatcattgttgagccattgccgggtctgcggagagcgtcggcgcggcgcgttcagggcgtcggggtacaaacgacgctatccaggccaccagcgaagtgagcgcgcggaaaaccaccttcaccgacggcggcgaaaactccgccaggtgacgatagccacggaagcccagcttgaggatatccagcaggctttccatcggcttatcttccgggaagctatcctgccaaagcgcccacgtatcagcgcgggcaaacgtacactgcacaaaatcgatatgctgctggttggttaacggcagcagctggagccccacttcgctgccgttgacccgcgcgaccctgaccgggaaggcatactcctgctgtccccgtttgagcagcagcctggcgttctggccttccagcacctgcgcgtcgccgttaattttgatccccagtccgccgtcggaatagtcgtggacggtgcaggagaacaggtgaccatcttcgcgggcgatagccgccggcatgctcatttcgacacggtgcgaacggcgaacctgcttgctttcaaccgagaccgccaccgcgccgccaagaataatcaggttgtagaatacccagacaatactcacccagacggtgaggatttcattttccgggccgtacatgaagcgccagatccccaccgcgacgccgaccagattgagcagcaccaggtagatatagggtcgggagatcacccagtcgacatactcctcttccaccagcccgcccttcgcggtgacgttgaacttgcctttatgcgggttgatcagcgccacaaaagtgggcggcgcgatataccaggccagcaccgtctcgtaaatttcactccagaacgaatggcgatatttgccctgaatcttcgagttggtcaggctggcgtggatcatgtgcggcaacacgaatagcgcgatcatcagcgctggcgcataaatgatataggcatggagcagcaaaaaggccagcggcgccgtgaggaagatgaggcgcggaataccggagagaaagtgaagcatggcgttggcgtagcagacgcgctgcaccagcttcaggcctttgccaaacagcggattatcgaggcggaatatctgcaccatcccgcgcgcccagcggatgcgctggccgatatgcgcggataaactctccgtcgccagccccgccgcctgcggaatacgcatataggcggaggtatatccccgccggtgcagacgcagcgaggtgtgggcatcttcggtcaccgtttcgacggctatcccgccaatttcatccagcgggccgcggcggataacggcgcaggagccgcagaagaaggtggcgtcccacatgtcgttcccgtcctgcaccaggccgtagaataacgtcccttcgttcggcgttttgcgaaaacgaccaaggttgcgctcaaagggatcgggcgagaagaagtggtgcggggtctgcatcatcgccagctctttctctttcaggaaccagcccatggtcatctgcagaaacgagcgcgtcggcacatggtcgcagtcaaagatcgagacgaactcccctttggcatatttcagcgcattattgatgttgccggccttggcgtgttcgtggctggtgcgggcgatatagtgcaccccaacatctttggcaaactggcgaaacgcttcccgtccgccgtcgtcgaggatccagatgttcagcttgtccttcggccagtcgataccctgcgaggcgtaaatggtgtttttcaccacgttgagatcttcgttataggtggggacgaagatgtccacagttggccacaaatccatgtcctccggcagcggcaccggctggcgattcagcggccagaccacttggaagtagcccagcaccagcaccacccaggcgtaggtctctgcgaacagcagaatgatcccgcacaccagacttaccgggtcgttccagttcagcgtcgaggtatagcgccaccagatatagcggcacgacaccgtcagcgacagcacgatcagcatcagcgccgagaaacggcccgggatgcgtcgcaccagcagcgccacgccccacagcagcatcaggaagataaactgcgacagcgggttaaagggctgcgtaatacacatcagcgccagcaccagcgagcagaaggtcacccccccaaggatcgcccggcgcagtttaggattgaggtgcgccagctctttctgtttatccagatggccggtgcgggcgttcatctgctcaggcaatttttccagccactgcgtatagcgaccgtgcaccccttccagcgccgccagcgaacgccagttgacctttttctccggctccggcacgcgcgtcgtcagtaaccacagggattgcagcaggtagcgcagcggatccagcggacgcgggcgatgcggatttatgtggggaaaataggtttcatggcgggccagaatcgcctgccagcgcggcgtctccagcggcatcagcgcccagaccagcgacgcccacagacagccaagcgacgccgacagccacgaagcgccgtgctgccgatagtcatcatagcgcgcacgcagccgctcccccaccggcggggccagcagcagcgtactgaggcggatcatgccgctctcccggcggaatagtggatcaggcaccagttcgccagggtcagcacctcttccgccgccagcgaatcctgacgatactccccaagaggttgtttcgccgccaggcactcggccatcgcctcgtcgcggtgaatcgtcaccggcaggatgcgcggctggctctccagccacagctggtagagatcttcctgcagctggctgccgacccgcagatcgttaatcagaatatcgccgttggccgggaggggctgctggtgtagacggatatggctattggcgtcgggatgaaccaccaccagcgagcgatcgcaaagcgtcagcagctcgcgagtcaacggcgaataacccgccggcagatccagcagcagccagcggtactggccctgtagctgctgtactgcctccgctatcgcccccagggtgggctgcagctggtcgacattttctctttcgccggcgctgagctggccaaacggcagtagatcgatatgctgcgtatagcgcaagcccgcgtcacgccagtcccggccgtcgagcagcgcccgcgcccagccgtcctgatgatggatatcggtattaaagaaaaagcgcagcatattatccgggctggcgtcgatcgccagcacgctttcaccgagcaattgcagggcccaggcgagtgcagccgtaatggacgtgacgccagttcccccgcgcacgccctgtaatcccagaatagccatctccggcttccttattttttctctgcaaactctgccagcagcggccagcgcttcagcgccgcgttcagctgttcgcgcctggaaatatcatgataatcaatatccggcagggaaaatgcccggctaagcgccagaaaatcattttgaaaggtgtaccccagcgtggcgtccgtgggtaccgcaggatcttttgctggcatatctctgtccgttcgaaatttattattaaaccagaggacgtatacagctcatccttaaaagcaggtgtacatgctaaaactgatgacctttaatttcaatgttaggtttactctgtcggtttcgctagtaaacttattcagtgtcaatcagggcgcacgagggatgccgtggataatgtatttactttgggtatttcatcattatgggatgaagtgtgccatatgccggtcggcggagtatggtggctcaacgtcgaccgttatgccgatgccgtcagcctgtttaatcagacgctggccgcgcaggcgaaaaacagccacgttgccgcgctggttatgggaaacaaacccaaggatatcatttccttagatcatactcacggtccggataatatcgcgctgttcaccctgccgaatcgcccgcaggcgctggaggaaatacaccgcgatttagtctgctccctcgaacctggcaattatttgtttattctgctatgcgctgaaaatgcctggcaaaatataaataatgaaaagttatgcgcctgggtagaaaagaccagccgctgggcgcaatatcaccgttgcgcgttcttagcgatcaattccgcgcaggatatcgatcggcagctgactcccttattacgtgagtaccgctccctttccggactggcaagtattcgttaccagggcgaccggcatatctttgatattgcctggtggggaagcgataagggtatcagcgcccaacagcagctgatggtgcaacatgatgacgctggctggcgattagcgcaggacgctgaaaccagcgtgcagccgcgcagcgacgaaaaagcgatcctcagccatgtgcgcgtgctggaaggcgccccgccgctgtcggaatactggacgctgtttgacaccaacgacgaggtcttcaacgccgggcgcaccgcgcaagcggcgacgatcctcttctccattacccaaaatacgcaaattgaacagctgggccgctatattcataccctgcgtcgccagcgcggtacggcgctgaaaatcatcgtccgtgaacaaaccccgagcctgcgcgcgaccgatgagcggctactgctcagcagcggcgccagcctggtgatccccagcagcgcatcgctctcccgctgcctgacgctaatcgaaagcgtacagaaccaaaagttctcccgccatatcccggaagattttgccaccctgctgacctggagtcagccgttaaagctgcgcggctaccagaagtgggatgccttctgcgaagcggtacacaacgtgatgaccaataccctgcttccacccgacagcaaaggcgtgatggtggccctgcgcccggcgccggggctgcgcgttgagcaggcgctgacgttatgcaaacctaaccggatgggcgacatcatgaccatcggcaataaccggctggtgctgtttttgtcgttttgccggatcaatgacctcgataccgcgctaaaccacattttcccgctgccgaccggcgatattttttctaaccgtatggtgtggtttgaggacaagcaaatcctctcggaaatcgtaatcatgcgcggcgtcgagccggcgcgctggaacacgccgctgcctctctcggtcggtaaaaacgagaccattaacgccacccacgatggacgccactggcgacgctaccccgaaccacaccggttaaccacccgcgaggagcaagcctgatgatgtctctcgccgatattctgcaactggtggtgctctgcgccctgctgttttttccgctgggctacctgacgcgccactatcagcgccggatccgcacgacgttaagactgatgttctttaaaccccgttacgtgaaaccggcaggggtattacgccggggaacaacggttaagcaaggcaaagcgaacaaatgacaaataaaaaaacgaccgcggcaccgcttccgctctggcagtactggcgcggccttggcggctggaacttctactttctggtcaagtttgccctgctgtgggccgggtatctcaatttccatccgatgctgaacctggtatttctcgcctttctgctggtgccgatcccgcgcgaaaagctacaccgcatccgccactggatcgctattccgctgggattcgcgctgttctggcacgatacctggctgcccgggccagagtcgatttttagccaggggtcgcaaatcgccggcttcagcgccagctatatctgggatctgattgtccgctttatcaactggagcatggttggcgccttctttgttttgctggtgctatggttgtttatcagccagtggctgcgcgtcaccgtgtttgtctcggcaatggtcgtctggctggcggtcagcccgctgctgccggcctttaccctatggccctccggtcagcccaccacggccgccgccacgaccgcgcaggccaataccggggccaacgccgccgctggcgccgcgtccagccccgccaacagcgatattccgccgcagaccgagccgccgacctcagccaacctgaccaactggctgaacgctttctatgccgccgagcagaagcgcaagacgccgttcccggaccagctgccggcggatgcgcagccgtttgacctgctggtgatcaacatctgctccctctcctggtcggatattgaagccgccggtctgatggatcatccgctatggaagcactttgatattgtcttcaaaaactttaactccgcgacctcctacagcggcccggcggcggtgcgcctgctgcgcgccagctgcggccagctgtcgcatactaacctgtatcagccgtccggcgccgattgctacctgtttgaaaacctggcgaagctcggcttcaaccagcagctgatgctcggccataacggtctgttcggcgacttcctgaaagagctgcgttcgctgggcggtatgcagagtccgctgatggaccagaccggcctgccggtcagcctgcaggcgtttgacggctccccggtgtatgaggatctggcggtcctcaaccgctggctgaagaccgaagaggccagcagcaatccgcggaacgccaccttctataacaccctgccgctgcatgacggcaaccacttcccgggacaaagcaaaaccgcagactacaaagtgcgggcgcagaagctgtttgatgacctggataacttcttcaccgagctggagaaatcggggcggaaagtgatggtggtggtagtgccggaacacggcggcgcgctgaagggcgataagatgcaggtatctggcctgcgcgatattccaagcccgtcgatcactaacgtcccgacggcggtgaaattcttcggcatgaaggcgccgcatgaaggggcgccgattatcatcgatcagcccagcagttatctggcagtgtcggagctggtggtgcgcgccctcgacggcaaaatgttcagcgaggacagcgtcaactggcagcagtatgtcgccaacctgccgcagagcgcggcggtgtccgagaacgccaacgccatcgtcatccagtatcagggcaagccttatgtccagctgaatggcggtagctgggtgccttatccgcaataagcgacaaggccgcctatgttggcggccttacatcgtgagacgttcccattctaccttctcagcccgcaggcatacgggcggggaaggcggcaaatcaatcaccgtatttagcgctgatcctgtttcgccagccagaccaacagcttgaggctggcagagtaataatcatccttgtcgtcaatctgcggcgcctcctgcggttcacccagcgtcagatcgcgcaccgccagcaggccgccggccatataccagggagccacctcgttggtgctgacgttgatccacgccggggtttgcaggcgcgggtaactctgcatccaggccttccagggcgcgagcaaggcgctgtgcggatcggcccacgagagatacagcgggatacggatcgcatcgaaactcatccgcggcggccactctttggctggcagcatcttgccatccgcccgcagcgccacccagtcgctgggtagatgtgatttcccccagcccatctgccccagcagcgcctgtccgtcgctctgcaatgtccgccaggcggtgagatgcgtccgctccgcgaaggcgcgccaggccgggaagatgaaataggaagggttaaggttcaggtgatcattgaggttgaaccctttcacacccgggagcattacctggcgaccggcgaaagacaccaccgtagacttcagcagggcggcggtgatggcgtcagaggcaatcgcatagcgcttatcctgccactgcttttgcgcgcgtagcagcgcccaggcgatcagggtatcgccatcggaggcgttgtttttatcggcgatagggtccggcgccaccgggttatagcgccagtaaaacagcccgttagacttgttgcgcagggtgttgtccgtccactgccacagcttgtcgaacgccggacgatcgttattcgccaccgccaggagcatggcgaagccctgaccttccgtatgcgacacattgccattagctgtatcaatgatacgaccatccggcatcataaaacgggccttatagcgctcccaggccgtatccgcccacgccctgggcaccagcatcactaccgttgtcactatcatcgccactaaagcacgcaggggcataaattcactctttatggatggtagtagagaaactgaacgtcagagacggagaacacccgctcacgctgcagtatcacgtgggcactgcctccctgactctgcagccagcgagaatataacccctcgagtatggcacagaacgcgttgcaccagcgcacgcgccccgcttcgtcgcggctgaccggcaacgcctgatggcgcaggcgcaggccgtcctcaccgacatcgatggtcaccacgccccagtgaaaatgagtcagcagccggttgatattggcctccagatcccccaccgtctccgacgccggcagcggatgggtctccgccagcgaggcgcccatctgacgcaggaagggctggctttccagctcgccggcattatttagcataccttcgatcataataatcaacagatcgaaccatccggcaggcgtctgctgctgctgaaaccaggtcatcaccaccgggttattgttctccgtcatcatcaatgatctcctaacatatagcgaatatagagcccggcggtgctttcgttataatccccgaaggtgtcatagccaatctggccccccagggtcatttgtttgttgaccttgtaatccgccccggcgcgcagggtataccctatgccgctcttcgaggtcgcggagtagtaggcttccttggcaaacccattgctcaccgccgtctccagggtctgctgccactccgaattggtcgggaaataggcgctcttatcctgactgtaagactgatagcccaccgagccgccgagcttcatggtccagttatcatatttctccgttagactgaccggcagcgatacgctgacgtagttttgcggactaaagtagcccccctgaccataggtgaagtagctgaggtttttggaataatccatatagctcatgctcaacccggcctgcagctggcggtattcgtcatggtagggacgaagatagaccccggcattggcgttgatactggtgttgctggcgacgttctgccccagatagctgtatccaccgccgccgacatagaagcccgcgtcgccgtcgtcatagctcagctgcagggtgccgccgtttttcgtcacctgcccccaggttttcccggaataggcgtctttcagacccacgtaggaaagcaggctgtcggttagcgagcggcgttcgccggtgaggatcagcgacagatagttggtcagcttgggcgaccatttcaccccgccgactacggtattaagatcctggcccaacggcgtgctgccgatatcgacccggtaatcgtcaccgcttaacgccagcgccagttcgacgccattggccttctgcgaatcggtcgagccgctggtctggtcaacgttcggcttgcggctggacgaagagagatagctggccacctgccccgcatcatagctcccgagcttcgccaggttttccatcccgctgctggtggtcggattgaaatctgccgcgttcagggtgccgaggccgcttaacgcctcggcccctggattgctggcgaaataggccgtccgctccgcctcggtcatcgaggcgatcgccgcctgctcgctggtggcggtactcaccatgttggagaccgcgttagccagcgggttggcgccgtagcgacgccaggcgtcgccgctggcggtcccggcgttcaacgacaccggggtgacggtaaagtcaaagcgcgagtcgccaaacggcgaggatgaccaggtcagcggcgtccggagctccgtcagcttgctggtgcccgattcgccgtcgcgtccacgcacgtccattcccccctgcagccagctgccggttttctcctgcagcgactccatcatggtgtccacctgacgcagcatccgcgtctgggcggtgtccaccggcagatcggtgcgctggatccccggcagcgtggaaccgggcgcggcggctgactgggcaacctgccacggcatgtactgcccgtaggcggaggccgtccgcgtcggcgccgacgtttgcgacacgccgataaaggggttatccgccgccagcaccccgccgacggtcggcgtttcgctactgttggtgctttgcatgcccagcagtttgccgcgggcgctgcgcagataggtcatcgcctgctgatgatgtccctgggcctccgccactctcgccagcagcagcaggcgatccggggagttatcctggcgcaaaccgccggccagctgttcagcgcgatcgttgttccctgcggacagcgccacgtcgatggccccggcgcgcgcatcctggttcggcgtatcgcgcgtcatcaggtagtcatagaccaccccggcctctttgttcattttgccgctctggtacagccgcgccatggcgaacatcagatcggtattttgcggatcgctttgcatagcgcggatcagcttgtcatacgccgcagcgtaattgccctgctcacgcaggcggtcggcttcgttgatcacatagccattgcgaatgctcgccagctgcgtcggcgtactgctggcctgcagctgcggattgctgatcaggttctgcgcctcgccggtcagcccggcctgattcaggacagcgatctgatcggcgtaatccccggcattgccggatacgccgctgctgatattgttgcgcaccagcgagaccgcggtggtcaggtcgccgctctcggccagcagacgcgccagcttgccggcgtccgccggggcttttggcggcgtggaggccatcgcccgcagggtattgctggcggcgatggtattgccctgcgccaggtagttttcggccgtcaccaactgcaggttgtagttcacccgctggcgcaaatcgcgcatatcgctggtctggctgccgccgggaatgcgcgccagcagcgtctgcgcctgctgccaggcgccgttttcgctggcaaacagggcggcggcatacagcgcactgttgctggcgccggggcgataggccgccgacatcagcgaagaggcctcgctgccgttacccgatttttgcagcagccgggccaggtcgaggcgcagccagggatcgtccggatagcgggcgacgccttcgcgcagggtggcaatggcgccggctgggttaccgctgctgacctgcgcctgggcctgacggcgcagggcatcgcccggcataccggccaccacccgcggctgcagtttttgccgcaggctctgcgggagcgtctgcagcatcgcctgcgcctcggcggatttattctgctcgcgcagcacgtaatagaggttttcccgcgccgccgcgttctgcggatcgtcatttaacagtgagcgcagcgtttgctccgcctggggcaaatctttgttgtgccgcagcacatcggcgcggaacagcttcgccgaggcgccctgcgccccgctctgctgcgccaacggcgcggagagcgccagcgcctggctgatattgccctgcttataggcctgctgggcctgcgccagctggccgtagaacagcgcatcggccgcctgctgacgacgggtcgccgaggcgtcgccgccgaggtccgcggcccggctcagatactgcgacgcggcctggtagtcgccgctgcgctgggcgatatagcccatgcccgccagcgcatcggcatcctgggggttagtctgcaatacctcttcaaactgctgcttcgcggcggcggtattgccgctgttgagattggcgtagccctggccgcgcgcctgaccgctgcgccgttcgcgaaagtaattctgaacttcgctgtcctggggatgccgctgcatccaggtgtcgtaatactgctcatccccggcctgcgggcccagccagagcagcgcctggcgcaagccgctgtccgcctctttattgccgctggccatcggctcgagcagggcgatcccttcccggcgagtctcttcccgccaggttaacgctttgcccaacgccacccgcggggcgttctcctgcggatgctgcgccacgtactggcgcagctcgctgatagcctgcggatagagcgatttgtcgctggccatggtcaggtaatattccgccgccagctcggcaggcggcgtattgccattgaacatgctgcgccaggtcgccagcgccccggggatattgcctccgcgcgcctgctggcgggccaggctgagctggccctgaggcacctgcgacatctttttggcgttgtccagatcctgtagtcccgggctgtcaggggccgctttcgccagacgcgcgcgccactgcgccgccgcctgcatatcgccgccctgctgcgaccagagcgccatcagatacagcgcctgggtgttgttggcatccaccgagagcaccttctgcagggactccatcgccagctcgtcatgagatttctcatgccagtagttggcctgagcgaacagcgcctgtagcgccgcgtcgttccccgccgccagcgcgccgcccgaggcagcgagagtcaacgcgccggtgaggcagaacgtggtaagccgacgggaggtcttcatcgttattattatctttcttttcattggttatcccccgaacccagacgcttacgggcgtgacgtttaaacatcgcggtcagcgccagtcccattatcgaggtggcaatcagccccagcaccgccaggaaacctgagtgctggctggcataccagaccgccatcatgtaccacggcatctgaccgctggggaacggcgtactcacctggaagctgcgcaccccgttatcgctggtgatcaccgcggtatcgccgcggatcccggcgttaatgcgcggcgattccagatcggtcttcagtcgcgccagctggtcatcattgctggccagcgccaccaccaccaggcgggtggaattccacggcgagcgatagctgatgaacccgcgccaggcgctgctcgacgaaaagtagcgatcggcgtcgaggctggcggaagtccagtcgccggtgagccggcgctggactttttgccacaggtctggctcgcggacgctcagcacattatctaccgggcgatagggtgagtcggccagcaggctctggttaaaggcctgctgatcgagagcggtgaccgccagcacgtcacgttcacgcagcgactgcaaatcccccccgccggtgggcatcccgagcacgacgcggttattcgccagcgcggtgccggtcgcgttcccggagcgtgccgccagattcagcagggtcgccacctgggtttcagacgggtccgccggcagcaggagggtcgtctgcgaatagtccgccagccgcgagaaggggaacgaggcgccgacaaagtaggagagattgggcaacagcgagaagtgacgcgtcttgctcaaatcgatccaggagtcgtcagtgatccggctcttgatattgttattcagcagcaccgaacacggaacatcgtcctttggcaccacattgaagtacatcgacagctggttatcgccgtaaatcaggtaaggcgccagcgggatggtaaagcgctcctggcgcgcatcgcccccgaggtagcgccagactttctccagcggcccctgcttgttcatcggcaggttgttgaggaaggtgccattgagcgtgacgctcagcaaggacttgtcctcattaatccagctttccgacgggaagcggtagccaacctgtagcggaatggtctccccatcccacagatagagatcgggcgcggcgcggaaggcgatacgtaaaggttcgtgccagacgccgctgacggtcgggctttggtccttacgcagcagctcgctgagcttgaccggacgatcggtggggatccagcgcggggcatcatatgctttgccaaccgggatggtctgcggttcgacatccagcgtcgcggtttgcggcgcaaagttgccgcgggttaaccgccaggcggccatgcgcagcgccgtatcgtttttaccgacaatcagcagcagtttataggccggattggcggggttggcgatgatgcgcagcagcggcttatcggtttccggcagcatcatgccgcccacctgctcccccggatggccaatcacgatgccgtggcgttccggcagacggtcgcgcagagcgctgaaggcaatgccgcgatagtccgcctggatacccagccaggaggagatcagcgccgcggcgctgaagacgtccgccgacggcttggccccataggcgaccgcaatgtccgccggggtcatctgcatgctgtcaaagaagggccgcgggaagtggctcaggtcgtcgctgatgttcagctgctggctttcccagctgaaatgcgacgtgggcagcaccgtcacccgcgacgtatcatgaatgtcacgctggcactgcagggtatcgccatcgttgatcttcacgctcaggttattgctggagaccatcagcgcgggcggaatatccagctgataatgggagacatcctcgccatcggcgcccagcggcagcgtgccgagcggttgaccgttgagcatcagctgcagggtggcgttgcggctcgccatctccggcgatacgcgaacggcaaggctgagctgcgaatggatcaccacctgatcggcaggcagggtaaagctgaccccaccctgtcgctggccgccgctgaggataatcccgtccggcatccccatctgcgccagattcagatcgcctccccagaccggagcgacaggaatgacctccggcgcggccgtgccgctcaccggcgggggtaagtccggcataaccggcgcaggggccgtcgccgccgcatcgccggcggtggcgggggctgccggagaggcgccctcctccggcgaggcagccggaggttcgtcgccgggctcgctgtccgccgcgtcgttgagctgcgggaagctcagcggggcagcggcgccggagcccggttcttcactgtgtagcgcaggcgcagagagcatccctgccagcagcgccagcgtggttaatcgcttcataacgtcccatcctcctgcgccgttttcgccactgttgcccgattgcgctggctgcgacgggttttccacgtcagccagaacagttcgaacacgcagcgtaaaatggtgaagaaggagcggaacgggttatcctgcgggcgcggcggattaatccacgcatccgcgcgggccagcaccacgcgcaccagttcacggcggcgcgaaagcggaatatcttcatcaaacttgaggcgcaggaagcgctcgtcagaggtgaccagctgggccgggatcgagatagccccggactgcaggatcagctcaatctcttcgatgtcatcctccagatggcgattatcaggcgcgaccacgcggcagccgcccatcgacaggtccgcggtatggctgcgcgagacgatgccgctggcgtaatggatcaccaccggaatatcgacatcgatacgaatggtttttcgcacctgccgcgtttcgcgcgccacggcaatcgccgccagcaggaagatcagactgtagatcccccacccgacgttgagggcgataacgttgggatccgagccaaaatagtcatggccaatcgcccggacgatgccgacgatcacccccagggccagcaggcaggccaccaccaggtgcgggcgcaccacggtgaaatcgaagtagccgacgtccagcagcccccccttatcggtaacgttaaacttgccgcgtttggggaaaatcatcgtcaccagggtcggcagcaccaggtggaaggccagcacaatatcgtagatctccccccagaagctgtagcgatagcggccgttcattcgcgaaccaacgtaaatagcgaggaacaggtgcggcagggcataggagacaatcaggctcgccgacgagtaaataatattgaggttaaacagcaggtaagccagcggggcagtgacaaacaccaccctgggcagcgcgaactggtagtagagcatggcgctgagatagcacaagcgctgctgaaaagtaagcccgcggccaaacagcggattatcgacgcggaaaatctgcgtcatcccgcgcgcccagcgggtacgctggatgacgtgcaccaccaggcgttcagtagcgaggcctgcggccagtgggatatcgagaaaggccgacttccaccccagacgctgaaacttcagcgccgtatgagcatcttcggtcaccgtttcgacggcgaaaccgccgatctgcgccagcgcctcgcgacggatcaccgcgcaggagccgcagaaaaaggtggcgttccagttgtcgttcccctgctgaatcgggccatagaacaacatcccttcgttgggaatgttgcgtccgacggagaggttacgttcaaacgggtccggggaatagaagtagtgcggcgtctgcaccagagccagcatcgggtctttcaggaaaccgccgacggtggcctgcaggaagacgcgcgtggcgacgtggtcgcagtcgaaaacgcagataagctccccctgagtcagggtcagcgcatggttaaggttccccgctttggcgtgcttgttgtcattgcgggtgatatagcccaccccaacgtcggcggcgaagacggcaaactcgctgcgcttaccgtcatccagaagatagattttcattttatcttttggataatcaatgcattgtgccgccaggacggtatcgcgcaccacctccagcggttcgttatagctcggaatatagatatcgaccgtcggccacttactcatatcatccggcagcggaacaatgccgcgcttcagcggccagaccgtctgcagatagttaagcagtagcatcacccagatatagacttccgccagaaagagtcccatgccgagaatagcttcaatggacgagttgaagtgcagggtctgcgtgaggcgaaaatacatgtaacgggtggacatcagcagcgacgtgacgaccataatgaccgatacgctgcggcgcttgctgaagcccatcagaaagagaataccgatacttaacagaccaaaaatatactgcttttggctgtccatcggcgtgatcaccaccagcacggcgacgggtgacagcaccagcgccagcaaccaaaaaagagattttttcattcagcagccctgcaaaaagttaacgccctgacatgcgtggctggctgtgcaccgtgccatcgccaatatgaatacccaacagcgaagatatttttttagccatgatttcaatatcgaaggccgctgccgaggaagcgttaaagtccaggatcgacttctgcgaggcattggcctccaccacgctttcatcacgatggatcacgccaagcagtcgctcgcccagtttctcttccatcaggctggtgacgtcccggctgacctggcgacggctatcgctttggttaatgacgaaatagtgcccgtgcttataattcagcgccgcgccggtcaggcgctgcttttctacgtgcgccagggtcgacatcgaggcggtatccgccagcagcgggataagatgcaggtccgccagccccgtcagcgcctttagcgcgggcgaaggtccagggggcatatcggcgatggtgataagcccgggataattaagcagcgcggacagaccgcgctggaggaaatggtcattatgggtcagttgctcatcaaacgcctgacgctgcgcctcgctcacttcgccatatggcaggacgaaaatattactgccggcgctcaacacgcactggctccagtcgtgcagctccagcgccttcgccacatagccccgctcatcgttcagcggtacgccaaaatgcaaacgcagcgcgttctggacatcaaaatccagcgccagaactttgctgcccgtccgcgccagcgaataggctaaattggccgccagggtcgttttccctacgccgcctttcggtgaacagacgcaaatcaacggcatgtcgcgatcctttccagaagtgatttcaaaggctggtctttatttttcgccaccggctccgcgcttttcgcggcgaacaggtgggcatagttctcggcggcggccgcgggtcggggggccattctcggcggcggcgccatggccggttccgacgccggaattgaaggcgcaggggtcggcgcaggctcctgcctgaccggctccggtgcggctgcggcggtctccacgaccggctgggaagtagcaggcgcggccgaagcggcagacacaacaggatcagaggttggcgccgctgctacggccgcctctacctggcggaacagatccgcgggcaccgactgcggcaacggcgcggagaccgagcctcccagcgccagagaagagggtttctcggcgccgggatttagctgattgaggatcgcccagtcgccgtgttcccgcgtggcggcagaaagatcctgaaagttgaggttttgcgtccgcgttttttcttgaaagcgctgcagatcatcataatggttcattgataacctcatgattttaaaaatttcatattaagtttgttgttattttctgggtatattaaaaatatcgtgacgcttctgggatggcagataacgcgccgatggtgacgtaccaatacacacgattgacagggttataatagtttagaatttgattttcgggatgattccacggcagaagtatcgctacactaacatttcccttgcagaagggtagccccattttttaggtatgcgtacatccttaacttcccgcaatcaccacgcttcccagtcgtttttatataaaagtattaggtcatgatgaaatcatagcgtcagatcagcgaaagaataaacctgaaccattttaatttctctttaattctataaaaatggactgaaaggcttattttttcggataatctacgaagaatgctctgagagcgtgacataaactgcggcaatatgcgtaagcgccaggttttatccacggcgggagagaagctcccggccatgggaccgggagcgcgccatcaggcgtgggacttttgcggattctcatcctggtcgacggcaaagcaggccaccagctggccgccgtaatccttcagctgcggctggagctgagtgcaggggccaaagcgacggcgacagcgcgcgttaaaggcgcagcccggtggcggatttagcgggctcggcagttcgccggtcagcttgatccgctcgcgccggtcgtctgggttcagacgcggcgtcgccgacagcagcgcctgggtgtacggatgacgcggattgttgaagatctggtctttggtgcccttctccacgcagcggccgagatacatcaccatcacttcatcggcgatgtgctcgacgaccgacaggtcgtgggagataaacacgtaggacagccctaaatcctgctgcagatccatcatcaggttcagcacctgagcgcgtaccgaaacgtccagcgcggagaccggctcatcggcaatcaccacatctggatccagcatcagcccgcgagcaatagcgatacgctgacgctgaccgccggagaacatatgcgggtagcgatcgtaatgctcggttttcaggcccactttcgccatcatcgccagcgctttttcacgccgctgctctttgctcaggctgctgttaatcagcagcggctcctccagaatctgccccacttttttacgcgggttcagcgaaccatacgggttctggaacacaatctggattttttgccgccgcagcttctgcgcctgcgggtcgtgcttaagcagatcctgcccctgataatagagctcgccgccggtggggatctcaatcatcgtcagcagacgaccgagggtcgatttgccgcagcccgactcccccactaccgccagcgttttaccgcgctcaagggtaaaggagacgccgtccagcgccttcaccagccgttccggggcgaataaccccttcttcaccggatagtgttttttcagatcaatggcctgcaacagcggttgtggcgtggcggccttttgcgtactcataatccaggcctcccggcatcatcgagtgggtagtgacatttagactggcggccgccggtcagatccgcgagcgccggctcttcgctacggcatttatccgtggcataggggcagcgcggattaagcaggcagccgttgggacggtcatatttccccggcaccacgcccggcagcgaggccagacgcgctttatcctgggcgaattccggcagcgcgcgcagcagcgcctgggtataaggatggcgcggcgcgcggaagatatctttcgcgtcaccggtctccaccacctgacccgcgtacatcacgataattttatgcgcggcttccgccaccagcgccaggtcatgggtaatcaacaccagcgccatattctcttgctgctgcaactccagcagcagttcgataatctgcgcctgaatggtcacatccagcgcggtagtcggttcatcggcaatcagcagttttggccggcaggcgatcgccatcgcgatcatcacgcgctggctcatcccgccggaaagctggtgcggataaacgtccagccgcgacgccgggtcaggaatacccaccaggttcagcaggtcgatcgcccgctggcggcgggtttgcttattgccgccctgatggaccttaatcgcttccataatctggtagccgacggtaaagcacgggttgaggctggtcattggatcctggaagatcatcgccacttccgcccccaccagctggcgccgctctttttcagagatgcgctgcagatcgcggccgttaaattccagtttgtccgccatcacccggccggggtaatcaatcagccccataatcgccagcgagctcaccgacttaccggaacccgattcccccacgatgccgaccacttcgccctgcttcacgctatagctgatgcggtctacggcgcggaacggcgcattctcatcgccgaaatgcaccgataacttatctacatttaataacgccatctcgaacctcttactgcttcagtttgggatcgagcgcgtcacgcagaccgtcacccatcaggttaaatgccagcaccgtcagcaggatcgccacacccgggaaggtcactacccaccaggcgctttgcgcgaactgcaatacgtcggaaagcatggtgccccactcaggcgtcggcggctgcgcgcccataccgaggaaccccagcgctgccatgtcgagaatggcgttagagaagcccagcgacgcctgaacaatcagcggcgcaagacagttagggagaatattaacgaacatctggcgcatcgcgccggcgcccgctacgcgggaggcggtcacgtagtcacggttgacctccaccagcaccgcggcgcgcgtgagacgcacatagtgcgggagcgccacgaaggttagcgccagcgaggcgttgacgatggagggcccgaagattgccaccagcaccagcgccagcagcagactcggcagcgccagcataatatcgacgacgcgcatgatgattgagtccaccactccgccgaaatagcccgccaccaggccgagcaccacgccgaggatcagcgacagaaccaccaccaggcagcccaccagcagcgacaggcgggcgccgtacatcaggcgcgacagaatatcgcggcccacgtcgtcggtgccgagcagatgcgccatgctgccgccgtcctgccagaacggcggcgccagcagcgaatcacggaactgatccgccgggttatagggggcgaggaagttggcgaataccgcgatgacgatcatcaccaccacgtataccagcccgacgaccgcccctttgttgcgtttgaaatagtgccagaactcctgcagcggagtcatgggtaccggcgcagcgataactttattttcagtaacttgtgacatgatggccccttacttcttatgccggatacgcgggttcaccacgccgtacagcaggtcgaccagcaggttgacgaggataatcatcgtcgccaccagcagcaccccgccctgcaccaccggataatcgcgacgctgcagcgcgtcgatcagccagcgacctaaaccaggccatgagaaaatggtttccgtcaggatggcgcctgccagcagggtgcccacctgcagaccaatcaccgtgaccaccggcagcatcgcgttacgcagcgcgtggatcacgatcacccgcatccgggtcaggcctttggcgcgcgcggtacggatatagtcttcgccaagcacttccagcatcgacgaacgggtcatacgcacgatcaccgccagcgggatggtgcccagcacgatagcgggcaggatcatatgcattaaggcgtcaataaagtcgccctgctcgccccagatggcggtgtcgatcagcataaagccggtcagcggcagggtatcgtcaaggaacaccgtatcgctgatgcgcccggagaccggcgtcaggttcagctgtaccgaaaccagcataatcagcatcatgccccaccagaagataggcattgagtagccggtcagcgccaggcccaccgcggtgtggtcaaagatggagccgcgttttaccgcagccagcacgcccaccggaatgccgacggcgacggcgaagatcatcgcgcagacgcccagctcaagagtggctttaaagcgcgggacaaactcctgccacacgggaatgcggcttttcagcgagatgcctaaatcgccgtgcagcacgccccagatatagtgggcatattgctgccacagcggcttatcaaggcccatttcggccagcagctgcgcgtgacgttcgggggaaataccacgttcgcccgccataatcatcaccggatcgccggggatcatatggacgaaagcaaaggtgagaagggtgataccgataaatgtcgggatgactagtcccagacgtcggagaataaactgcaacataacccggattctctctagtgacgccccgcctggcgacagggcgtctgtattgctcacaaaagcattccccggaatagcgggaatacgccccccgcctctcccacgcggggagagggggtcaggcatcgtgcttattattcgacagagacgttatcgaagtggtgtttgcccagcgggtccaccacatagcctttgacttctttacgcaccggctcatagacggtggagtgagcaatgatcagcgccggagcctggtcatgcatcactacctgagcctgtttgtacagttcaatacgcttgttgtggtcgtcggtagcgcgggccggctgaataagatcttcaaacggcttatagcaccagcgcgagtagttggagccgtctttcgccgcggcgcagctgaacagggtcgcgaagaagttatccggatccccgttgtcgccggtccagcccatcatcacgctctggtgctcgcccgctttcgcccgcttcagatactcgccccactcgtaggtgacgatcttggcctggacgccaatcttggcccagtcagcctgaatcatctccgccatgcggcgggcgttcgggttgtacggacgctgtaccggcatcgcccacagatcgatggtgaagcctttttccaggcccgcttctttcagcagctgcttcgccttctccggatcgtaggtgtagtccttaacgtcgtcgttatagccccacatggtcggcgggatcaggttcttcgccgcctggcctgcgccctggtaaaccgctttgatgatcgcttctttgttgaccgcgtaggtcagcgcctgacgtactttgacgtcgtccagcggtttcttctcggtgttaaaggagagataaccaacgttcagacccggctgttccagcagggtaatgttcttatcttccttcatgcgcgcgatgtccgccgggttcgggtacggcatcacctggcactcatttttctgcagcttggcatagcgcacggaagcgtccggggtgatggagaagaccagacgatcgatctgcggcttggtgccccagtagcccgggaaggctttatacagaatgcgcgagtctttttggtactgcagcagctggaatgggccggtaccgataggattgagatccactttttccggcgtgccggctttcagcatgttgtcagcatactctttcgaaagaatggaggcgaagtccatggccagatcagcgaggaacggcgcttccggacgggtcaggacgaactggacggtattatcgtccactttcttcacttcgctaatcaggtccggtaagcccatcccttcaaagtattcatagctgccgccagaaactttatggtacgggttattagtattcttctggcgatcgaaggagaacaccacgtcatcggcgttcaggtcacgggttggtttaaagtctttattatcctgccacttcacaccctgacggaggtggaaagtataggttttgccatccgcactgacttcccatttctcagcaagtcctggaataacttccgtcgtaccggttttaaattcgaccaggcggttatagatcggtacggagctggcatcataggtggtgccagaggtgaagagctgtgggttaaatccttccggcgagccttcagaacaataaaccagggttttcgcttgcacgctggcggcgacggtcatggcgaccaggctcagaccaagcttcagcatccctgatttcttcaaggaaatactcattattctgctccaaaattgtgatgttgtttgcatatatccgccggacctttatttattttttacccggtccggtcggtggtgcccgaaggcgtagagagagatggggattcctttcgcaaaaacgactgagttgcagtacggattctccatgaaatgcccctcatgccctacaatctgtcaacagaatggggaaacgtcaatacagccagccgggttttacatccagcgtgagaaacggcaggcaaagattaaaaaaacttcaggacgctattttcagcagagaaatttatgctactggcaattcagcagaataaagaccttattaatttgcaacacccagtgggaaacaatgccagcaaatgagaaaaatttcttgctgtgtgaccaatatgtgagcgattaatagcgtgaacgttaaaacgcacagcggaaaatgctgcattcagccataagcttcgcgaaaaaagatctgttcatcgataaaaaaatgcaatggaagatgtcacaaaatagcgaatagccggctgaaaacgtgagtaaagacgtttattgtgattttggtggtatttttggccagttgtgcattgatgatgcccggcggcgctgctggactgaccccataaagttggatggttcatattaagcggctctcagagcctgggttcggtactctaccggactcaggccttttaatttcaggcttatccgctcgttgttgtagtaatggatatagtcctctacggcttttcttagcgcactgacactcctgaactccctcagataaaaacactccgatttcagggtcccgaagaagttttccatcactgcattatccaggcagtttcctttacgcgacatactctgcgtcatcccatgcgcctttaaacgttcctgatagctcctcatcctgtaatgccagccctgatccgagtgcagcagcggagcatctcccggtctgagcttcgggaacgcaccgtccagcatcgtattcaccatctccatcaccggcctttccgacaggctgtaggcgataacctcccggttaaacagatcgagaactgacgacaggtaaagcttttttccctgtaccgggaactctgtcacatctgttacccatttttcgttggcttttgacgcaccgaagttccggctcaggatattgggcgcggcctcgcccgttctccctttccaggcacgatattttttcgcccttatcacagaccggagtgacagttctgccatcagccgctgcactgttttatggtttatccgcagcccctgttttcttagtgcgagcgtgatcctgcggtagccataacgacctttgtgatagtggtatatcttcctgatgttctctttaagacccgcatacctgtccccttgcttcagtgcattcatattgtaataccacgtgctacgggacataccggccgcccgcagaaggtcccgcagagcgtgttcatgccttagttcactgattatcagggctttttgccatttttttcgctctgaaccaaggctttcaacttttttagataggcattctctgcccgcagataacgcagttcggccctgagttcttcgggggagagtttttccagctctttatctgtcagtggtgggatattttttggctttgtcatttgtccgggccgtccgcattgcatgtttaaaagaccttccgctccggcatcgttgtacacgtcgagccagcgccggacaagtatttctgcggagagattaaaccgggcagccgcttcacgcatcgtcaggcggtcactgataaccgcccggacgaccacgagtttaaattcatcggaataatgattattttttgcagtcaggccttctgcaccgtggaactgccatgccctgacccagcgacggacagatgttctttcaataccaaaaaggtcggctgtactctgttctccgtctttaccggacaaataatgattaaccacagccagttttgtttcaggggaatactttggtttagccataaaattgcaccttactcagttgggtgtccaacttttggggtgcagtccatgcgcttgcgcgggcctacgaaacgcgagtcgaacctcctgcccccggaggttctcatcctcactggcctcagatgcaaaaaagcctgctcattgagcaggcttttcgaatttggtcggtgatagaggatgactcaccacttcgtggctcgccctgcgggccgttgctgacgcaacgttctctcgcttcgctcgagtcgaacctcctgcccccggaggttctcatcctcactgacctcagatgcaaaaaagcctgctcattgagcaggcttttcgaatttggtcggtgatagaggattcgaacctccgaccccttcgtcccgaacgaagtgcgctaccaggctgcgccaatcaccgaatgcggggcgcatcttactgctgggatgcctacccgtcaatgccttattttcaaaaaatcgctcaaccggcgagaaactcagcagcctgagcagcgaatcgccggttgctcaacgtttttagcggcagttgacctcaaacgttttgcgatactcggataccttacatgtcaccggctcgccgagataggttgcgcccgccggggtgaatgtaaactctcccagtagcatcgtcagctcccccagctccgggcaggattgctgatgacgcataatatccgggcgggtatcgttattcaccgcccgggcgatgtcgctgtatgccagcttgtcagcaaaggcattagcacaaaactgcagttcgctttgcgccatatgcgcggcctgccccttcagctcggcatgctgtgccagcagcagctggcgaacctcgccggcccggctgtagccaatcgccgtatagccggccttattgctgaggttgacgctggcgccagccgcaagcagcgcctcgacattggctttattattcattttgaccgccagcatcagcgggctgagatcgttggcggaaagctggtccacctttgcgccgcgctgcgccagcgccgcgatcaccgcaggcgccccctgacccgccgccacctgcagcgccgtgagtccttcacggttcggcttatccacttccaccccggaggccgacagcgccagcaccagatctggatcatcccccgccgccgccagcatcagcggtgtggtgccggatttatccgccaggctggtgtccgccccggcgttggccaacgtcgtgatggtttccgccgatcgcgcgtgatcgacagcgaggaaaaaggccgattccccggacacgttgacggccttcacgtccgcgccgtgcttgaggagcagcgccactatctcgtcgacgttcttcttaaacgcgccgggcgccagttgtaacgccatgtcttcggtcatcagcgcgcgattgcccgtcgccagcgatttcgccgccgttgcgccaactatcttgtccagcgtactctcctcttcgacaggcgcatcgggctttttcatcgccagaatatgctgatagtcgtttctgacgtccccgccgtcggagatggcggacatcaatgccgtactcttgtcgatggaggtctgattcaccgacgctcccgcctggagaagatcgccgataatcgcggtatcgctgccacgcgccgccgccagcattagcgccgtgacgccctggcgcgtctggaggttcggcttcgcccgacgcttaagcagcaattccaccacatcgcgacgattttccgcagcagcgaccatcaggccgcttaagccggttttatcctgaccatccacatcaatgccgttatccagcatggctgcgatcgtcgctggcgcatcgtatttacaggccagcaggaactggctggtctcttcctcagactggcagcccgcgagcatcatcaggcacagtaggaccaacccctttatcaccttcatcctttctctccatgaaaagttcatgcacaggggaagcgaggaaacaggggtaatcaaagaagaagaggtcacctgccagacacgtccactgtgcgaaaaaaatccctcgcgcggcgtcggccggcgagggattagcttatcctgggctcaggaaaggaaaacagacccgagaatctgaaaactatcgggccttactttttccaccggcaccagttgttgttctcattgatcccgccatccggcgaggtatagccgaggcagcccataatggtgtcgtacagctcgacgtgacggcgcggcaccttcatcgcagcctgctgctgcagatgggcaaacgcggcggcgtgatcgggattttccaggtacttatccgacatccacaccatcatcggcacgcggaactgctccggcggcgccatcttgcgcggcgtaccgtgcaggtgttcacgctcgttaatcgactccccgtggtcggcggcatagaacacaatcgctttcttatcccgcagctggtcgaggacgctgacgataaagtgatcgacataggtcacgctattgtcgtaggaattgatcagttccgctttcgagcacttgttgtcgacgccgacgcactccggtttccactgggcgaagctgcgcgggtagcgttgggtgtagttaaagtgggagcctttggtgtggagaatgatcagatgcttaccggaggcgttgccctgcgccataccgcgcttcatctcatccaccagcagcatatcgtcaacgctcttaccgcggttgcgcggctcggcgccaatctgctcgcggtaggcgatattgttggccatcgtgttgctgtagaaccacatctcgctctgcatggcgtacagattgccgctgaagcccagctgatgcagcacggcaaagacattctgctctttgagcgtccgctgtgggttatcttccgccccgccctcgcgcacaaacatgcagcgtaacgacagtttggtagcggtatcgcacgagtaaccgcggaaggcgacgagattcttctctttctccagctctggcgtggtattgcggctatagccgaggatgcccatatggtcccagcgggtcgtttcgccaatgataaacaccacgtaggtatcatccagaccttccggcgcgacgtaggtgaacttcttcgccgggttaatcagcgatttgttgtctgaggattcatccacctgcgcccaggcgtacagtcccagcgccgacaaccagttcgacggcaggtaagagttggcgatcaccccgccatagctcggcatatccacttccgaatggcgctccacatcatgctggcgcagctctagcaggcggatgggtccccagacaatcagtccggccagcaccacgatcagcacgtttttaacccgctggcccggggtgcgcagctggcgcagcagcgtatggcggcagcggttgctccagatgaacagcaacggcggcgcgctcaccgccaccagccagaggatcaggtgccagccgatgacctctttcgacaggtcgatatcggtggtcatcaccgaagcgataatcccgtagccaatcaccacattgaggaacgtcatgtagtaactcgccgcggcggaaaacaggacaatcagcgtcgccagaatgcgccagatacggcggccgaacagcgacagaagacgtaacaggaagaaggtgacaaataccgtggcaaccagttcaacaacaccggaaagccctttccagaaagtgaactcttgagcataaccatcgaaacgccggaaaaaaacggcgacgttcataaaccagccgatgtacagcgccagccaaaaactaagcttctgctgcgtcatcgttctaatatatttcatgcaagcaaacctggaaaaagaagaataaaacaccgcctgacgctgtggcacgagtcagtaggctaatagggtgcgttagggttggttatcagaaacctctacaaaccgcgataagtagaccacagggaacgagaaaagtatcaggagggaatgtgatccagccaaacatttacaaaacatttggctggattggcactatttgcttagggaaataaccaggggcacgtttcacgccgcaggtttcaggcgtgcgcctcgttatataccgtgcttttcggctgacgaatggtggtggataacgccagcgagaggatcagcagggcgaagatcacgcagaaggtcacgtagaaaccgccgaacagcgaagcgatgagagagccgcagatgctgccgataccgaagcccagataaatcacgccatagtttttcgccagattgttcagaccaaagaactcactcaccagcgacgggaagacggtaatggtgccgccgaagttaaaggcgacgcaggcgatggcggcgaagaaggtcaaggcattcagcggggcgaacagcagcgcggccatccccaccagcgacacgacctgaccgatggtaatcacgcgaatgcgggagattttatcagacaggatacctaacaccaggcgaccgctgaggttcgcaatcgagataaccgttaccgcgttggccgccgtggcgacatccaggtggaccattccctgggcaatatctttcgctacgccaattacgtacagaccgctcatgcaggccgtcaggaacatcaccgccagcatccagtactgcggtttacgcatcgattcggcgagggtgaagtcgttttccacgacgccgttggccgcggtggctgccgggtgatttggcgcatctttcatcagggtcgcgccaaagacgatcatcaccagcacgatagcgccccagataacgaaggttttttccaggccaacggtggccagcaggtgggaatcaatgaatttgaaccccaggctgccgagaccataggagccaatggagaaggcggagatcaaccctttacgctccgggaaccatttcacgcagttcgacagggtcagcaggtaaccggcgccgtccgccagccccaccagcacgcccgcgctcagccacagcatcatcaggctgctggagtgcgcggtcaggaagaagcccaggccgagcaggatcccggaggccatggtgacgcgcttcacgccaaagcgctcctgcagcttgccggcgaccgacgaagagagcgccagcccgaggctcagcagaccaaaggaaaaagccacctgactgaccggctcgcccagtttgtcagacagcgaactgttaaacaggctccaggtataaaccgaaccgagagcgaattgggtgatgatggtgccgatcagtgtcagccagcgggtcgattgacggtttgcagcgttcatagcagttgtcctgataaattaactgccgccacaatagcgaaggcccctcatccagtgggggaaaaaggcatgaactgccatcagcggggaatgaaatgcattaatgttggaatgaatggcattgcataacattcactccgtaaattacaggcaaaaagttagtgtgcgctatctcacagaaatgcgccattgctgagatttaacaataaccacatcgtttcaaatgcgtaacaattcccgattaaaaattggcgctgacccccatcaaatagagcgtattttcccctgacggcaggttatccgcctgcgacagcgttgcccatgccgccacgtgggatcccaaccgcatatcagcgcccagggtgacatcgctccagcctccctccctggcacgggtcatcggcgcccagacatcgctggcgagcgactggttatagctcacctgcgcccagggatgcacgccccacagcgcctgataatccatgcgccagccgagcgtgttaacgtagcccacctcgcctgcgcttctcaccgtcggcgcggtgacgtcgctgcgcaggctggccaccggcccggaggttacgccgtttgctagcgggtaattccagccaacgctcaggccacggccgctgtccggcggcgccagcccctggtttaacgccagcccgccgggcgtctcagaggacttcatccgctcggcgagaatatcttcataacgtggttggtgatcgctatcccatgtatagcgttccgacgtattactttttgtatcgatagcgatatattcctgttgccaggcattcgctccagagacacatgacacccagacggatacgctcgccgggatcaagaacccccggaggccattgcatttctttattatcattaatgcgactccagaaaagagccgaatcggcaatattgctgtgtttttagtggggatacgatttccctgtattaactattatctttatctttcagccgtcaaggcgggcgtccacttttttagcgcagagggagaaacagctatgcagcgttgcggatgggtgagtcaggatccgttatacatcgagtatcacgataccgaatggggtgtggcgcaaaaagagggtcgccagctgtttgaaatgatctgccttgagggccagcaggccggtttatcgtggatcacggtgttaaaaaaacggcagaactaccgccaggcttttcaccagttcgatccggtgcgcgtggcggcgatgggtgatgacgatatcgagcgactcctgcaggataccggcatcattcgccatcggggaaaaatccaggccattatcggcaacgcccgcgcctatctggcgatggaagaaaatggcgagtcgttcactgattttgtctggtccttcgtcgacaatgcgccacaggtgacccgcgctgcgacgctggcggaaattcccaccacgacgccggcctccgatgcgctgtcgaaggcattgaaaaaacgcggctttaagtttgtcggctcgacaatctgttattcctttatgcaggcctgtgggctggtcaacgaccatgtcaccggctgcttctgtcaccctggaggtcaggatgatccgcaagtgggacactaaagataccgcgccgctgctggcgctgtggctggacagcacgattcatgcccatccttttatcagcgaaagctactggcgcgacagcgtcgcggtagtacgggatgtctatcttcccgccgccagcacctgggtctgggagcaggatggcgagttaaaaggctttgtcagcgtgctggactcccgtttcgtcggcgcgctgtttgtcgcgccgggcgccacccgccagggcattggccgggcgctgctggatgaagtcaaacagcactacgcctggctgagccttgaggtttatcagaagaacgaatcggcggtcagtttctaccatgcgcagggcttccggattgaagactgcgcatggcaggacgatactcagcacccgacgtggattatgcgttggccggcggatcaaatgccgtaagcggcagcgccgggccggtatatttctccagccacgccagggcggtgttcccggcacagccgttgcccagccgggatgtcggaatatctttggttaagacgttcaccgccccgtttttgcagatgccgacctgcggatccaggtcgggccacgctccttcatgcaggcaaatcacccccgggcggatcccctccgtcaccacggcgccggccagcacctgaccgcgggcgttccatacccgcaccagatcgccatcgacaatcccgcgcgcctgcgcatcctgcggatgaatagtcaccggttcgcgcccggcgacggcatagcgctcgcgcagcgcggtgtggttcagttgactgtgcagacggtgggccggatgggccgacagcagctgcagctgccccgcctctgcgttgccatgccactcgtcgggctccagccacatcggatgcggcggacagtcggcgtaaccaaaagcggcgatggtcggcgagtggatctctattttaccgctcgccgttttcagcgggttggcctggggatcggcgcggaaggcggcgaaacgcgcaaaacgggcattctccggctcctccggcatctcaatcagctggttagcctgccagaattcggcaaatggcggcagcgtcacctgctgctgggcgccgcgccgggcggccatctgatagaaagtctccagccactgcaaatcactcttcccttcggtgaagcgttcgcggccacccgcctcccagcgttcgctgaggtcggcaaagaccgcgaaatcgtcgcgcgcttcatctcgcggggcaaccacctgcttcatcggcaccagatgctggttactgtagtccccggtcatggtcagatcgttgcgctcaaacgaggtggtcgccggcaggacgatatcggcatggcgcgcggcggcggtccagaagcattcggaaatgacgataagctccggtttctgccacgcctgaatcagtcggttggtgtcctgatgatgagtaaagttggcgccgccggcccaccagataaagcgaatatcgggaaagcgccgcgccatgccgttgtgctgatactccgcccccggattctccagcgcctcgacaattcgtgcgaccgggatcttctccaccgcgtccacgcctccggccacgctcccctgcatcgagcccagcaccgccgcgcggcgggtcgggttgccgccgttggcaaaatgataggaaagaccaaacccgccaccgggggtgccgatctgtcccagcatggcggccagagtgaccagcatccagtgtttctgctcgccatactgctgacgctgcatgccccagccggccatcagcatagtggtattttcgtggaaaagttgcgcaagttcgcggattttatctgctttaacgccgcagatcgctgctgcccactcagcggttttcgctacgccgtcgctttcgccggtcagatagcgggcaaaaatatcgtagccgctggtgcagcgggtaagaaacgcattatcctgccagtcattttccaccagcgtatgggcaatccccagcatcagcgcgacgtcggtgcccatatgcggcgcgatccactccatcgaatcgccaaagaaatcgacggtttccgatcgcatcggatcgatgcagatcagccgcttaccgctctggcgcagccgatcaaaccacgggatcccttgctcgtcggaggcattccaggcaattttcagcgtgttcagcgggttggcgctccacagcaccaccacttcgctgtgctcgagcaccagcggccaactggtctgctgctgatacacctcattgccgccaacgacgtaaggcatgatcgcctgcgccgcgccggtggagtaatcgccaagatggccggtatagccgcccgccaggctcatatagcgctgcagcagcgtcgccgccttatgcaatacgccgttagagcgccagccgtaggagccggcaaaaatggaggccggaccgtagctgtcgcggatccgccgatgctgggcatcgatcagatccagcgcctgctcccagctcacccgcacgaattcatcctgaccgcggaccccctggggcttgtccggtgaagcaaggaagcctttacgcaccattggatagcgcacgcgggttttgctgtgcacctgatcgcgcactgccgtttgcagcgagttggcaaacggtgtcgccagcgcgccgcgggaagagaggacgttttccccgtccgtttccaccagcatcggtccccaatgggcggcggttaagatggttttggttgcagatgaggttggcaagggcggctcctggtcagcgaatgcaggtgtaatgacggcgtgatgggcaaccgttcaatgttatttacaaaaagagatggtatccggggaattttctccgtaatcgcgcgtcataatcaaccgtcacgttcgctgtgacaaagaataaaaaggattaaggacattaaatgaaaaaacgcgtacttatgattgcggcgctggtcagcggcactctggccatttctggctgcaccaccaacccctataccggtgaacgtgaagcaggcaaatccggtattggcgcaggtattggctccttagtgggcgctggcgtcggcgcgctctcctcttccaaacatgaccgcggcaaaggcgcgctgattggcgcagcggccggcgcggcgctcggcggcggcattggttactacatggacgtgcaggaagcgaagctgcgcgacaaaatgcagggaaccggggtcagcgtgacgcgaaatggcgacaatatcgtgctgaacatgccgaataacgtcaccttcgacagcaatagcgccaacctgaagccggccggcgccaacaccctgaccggcgtggccatggtgctgaaagagtatgagaaaaccgctgttaacgtggtcggctacaccgacagcaccggcagcaaggatctgaatatgcgtctgtcgcaacagcgtgcggacagcgtcgccagcgcgctcatcacccagggcgtggcggccaatcgcattcgcaccaccggcatgggcccggcgaaccctatcgccagcaacagcacggcggaaggcaaagcgcagaaccgtcgcgtggaaattaccctcagcccgctgcagtaagcgcaacctcatgtcgcccggcagccgctctgccgggcaaaatgcttgatatcgctatttttcgcgctaaggtgttggcagattttcagcaaaggaagccaccatggcgaaagcggcgcgtgcaactatcagcgatgtggcgaaagccgcaaagaccggcaaaaccagcatttcacgttatcttaacggcgagaagcatctgctttccgacgacctgttatcacgtattgaaaaagccattgccgaactcgactaccgccccagcctgatggcccgcggcctcaagcacggccgaacccgcctcatcggcctgatcatcgcagatatcaccaatccctactcggtcaacgtcatgagcggcattgaagcagcctgccgggaaaagggcttcaccctgctggtgtgtaataccaataacgagctcgatcaggagctgcactacctggacctgctgcgcagctaccaggtggaaggcatcgtggtcaacgcagtcggtatgcgggaggatggcctgaaccgcctgcagcagtcggccctgccgatggtgctgattgaccgtaaaatccccgacttcgcctgcgatgtggtcgggcttgataacgcccaggccgccaccaccgccaccgaacatctggtggaaaaaggattcgaggccatcctgtttctcagcgaaccgctgggctcggtgaatacccgtcgcgagcgcctgagcgcctttcgcgccacgcttgcccgccaccacggcgtggtggccgaaaacgccgaggtgcagcttaacgacggcgcgatgctggacaacgtcctgcgtcagttccatgcccgccaccgcgggatgcgcaaagcggtcatctccgccaacggcgcgctgacgctgcaggtagcccgcgccctaaagcgcgtcggcctgatctgggggagcgatatcggcctgctgggcttcgacgaactggagtgggcggagctggccggcgtcggtattaccaccctcaaacagccgacgtggcagatcggctacgcggcggtcgaacaggttattcggcgcattgccggcactaacgaccccatccgcgaacgggtattttccggcgagcttatcgtccgcggatcaacctcccgttaacgatccttcgtgatgccgatcataaattaaacatctcgccctttcttatggaaccgataccatctagcgtattaaggagattaagcaacaaacgccgggagtaagagcgcgatggccagaaaaattattgtcgttaccgctgcgtatggtaatgaccatgttaaatccttaggcgggcaggccgccgtcctgccgtttatcgccaacgccggcgcggacggcgtcgaaatccgccgcgagctgtgcagcgcggaagagctcaacgctctgccctcgctggcggccaccattgagcgccacggcctgctggcctgctactccgcgccgcaggcgctgttcaccgacaacggcgagcttaacccggatctcccgacgctgctcgcggaagcgcaaaccctgaacgctctgtggctgaagctctcccttggccatttcctccacaatcagcagttggatgagctgcgcgatatcctcagcgacagcggcatggcgttggtggtagagaatgaccagaccgactgcggccagctggcgccgatgcagcgcttcaaagccgcctgccgggtccatcagctgccgatcaccttaacgtttgatatgggcaactggctgtgggttggcgattcaccggaagaggcggcacgtcatcttgcgccggcggtcagctatattcatgttaaagcggcggagcctcatcatgagaaattccgcgctgtaccgccggatcaggccgccgaacgctggctggccctgctcgataatcttcccgccgacgcgccgcgtggaatcgagtttccgctgactggccatgacctgacggccgtgacccgccgctacgtcaacctgttacgcgaggattaagtcgtggaaaatttagatgtcatcaccatcggcgaagctatggccatgtttgtcgccaccgaaaccggggatctggccgaggtggagcatttcatgaaacgtgtcgccggcgccgagctgaacgtcgccaccggcctggcgcgcctgggtctgaaagtcggctgggtgagccgcgtcggcaacgacagctttggccgcttcgtactgcaatcgctggcgaaagaggggatcgatagccacgctgtggccatcgacaaccgcttcgctaccggtttccagatgaaatcgaaagtcgaaaatggaaccgatcccattgtggagtatttccgcaaaggatccgcagccagccatctttcgccggacgattttcgcgccgactacttcaccagcgcccgccatctgcacctgagcggcgtcgcggcggccctttctgagagctcttacgcgttgctggagcatgcggcgaaggtaatgaaagccgaaggaaaaaccctctctttcgaccccaatctgcgcccggtgctgtggaaaagcgaagccgagatggtggagaaactcaaccgtctcgccttccaggctgactgggttttgccaggcttaaaagagggcgtgattcttaccggccagcagaccccggaagggattgccgatttctatctctcccgcggcgtcaaggcggtagtcattaaaaccggctgcgacggcgcctggttcaagagcgccagcggcgaacagggaacggtcgatgccattaaagtcgataacgtcgtcgataccgtcggcgccggcgacggctttgccgtcggggtgattagcgccctgctggaaggcaaaaccctgcttcaggcggtgaaccgcggcaataaaatcggttcgctggcgattcaggtccagggcgacagcgaggggctgcccactcgcgacgcgctgggcgagtaacttttctacgcaacgataacagccgtcctgtaccctacctgcagcgcggcacagcagcgtccgtttcgacggacgtatgtctcctcattgacagaggcaagcctatgaatagctcaacaaatgcaacgaaacgctggtggtacatcatgcctatcgtgtttatcacgtatagcctggcgtacctcgaccgcgccaacttcagcttcgcctccgcggcaggcattaccgaagacctgggcatcaccaaggggatctcctccctgctgggggcgctgttcttcctcggctacttcttcttccagatccccggcgctatctatgcggagcgccgcagcgttcgcaaactgatctttatctgcctgatcctgtggggcggttgcgcctccctgaccggtattgtgcataatatcccggcgctggcggcgatccgctttatcctcggcgtcgtcgaagccgcggtgatgccggcgatgcttatctatatcagcaactggttcaccaaatcagagcgctctcgcgccaacaccttcctgatcctcggtaacccggtgacggtcctgtggatgtcggtagtctccggctacctgattcaggccttcggctggcgggaaatgttcatcatcgaaggggtgccggcggtgatctgggccttctgctggtgggtgctggtgaaagataagccgtcgcaggtgtcctggctggcggagagtgaaaaagcggcgctgcaggaacaactggatcgtgaacagcaaggcatcaaagcggtgcgtaactatggcgaagccttccgctcccgcaacgtgatcctgctctgcgcgcagtattttgcctggagtatcggcgtatacggctttgtactgtggctgccgtcgattatccgcagcggcggtgaaaatatggggatggtggaagtgggctggctctcttctgtcccgtacctggcggccaccatcgccatgatcgtcgtctcctgggcctcggataaactgcaaaaccgtaagctgttcgtctggccgctgctgctgattggcggactggccttcatcggttcctgggcggtcggcgccaaccacttctgggtctcctacaccctgctggtggtggccggggcggcaatgtatgcgccttacggccccttcttcgccattattccggaaatgctgccgcgcaacgtcgccgggggcgccatggcgctgatcaacagcatgggtgccctgggctccttctgcggctcgtggtttgtcggctacctgaacggcgccaccggcagccccgcagcgtcctatatttttatgggggtagcgcttttcgcctcagtatggctgactttgattgttaagcctgctaataatcaaaaccttccacttggcgctcatcacgcctgaacgactcatactacggagattcgcatgaagccgtctgtcattctctataaaacgcttcccgacgacctgctacagcgtctggaggagcacttttccgtcactcaggtgaaaaacctgcggccggagaccgtttcgcagcacgctgaggccttcgcccaggctgaaggcctgctgggctccagcgaaaaggttgacgccgcgctgctggagaagatgccgaagctgcgtgcgacctccaccgtttccgttggctatgacaacttcgacgtcgaggcgctgaacgcccgccgggtgctgctgatgcataccccgaccgtgctgaccgagaccgtcgccgatacggtcatggcgctggtgctgagtaccgcgcgtcgggtagtggaagtggcggagcgcgtcaaagcgggtgaatggacgaagagcattggtccggactggttcggcacggatgttcaccataaaaccttaggcatcgtcggcatgggccgcatcggtatggcgctggcgcagcgcgcccacttcgggttcggcatgccgatcctgtataacgcgcgtcgccagcatccgcaggcggaagaacgcttcaatgcccgctattgcgatctcgataccctgctgcaggaggctgactttgtctgcctgatcctgcccctgagcgaagagactcaccatctgttcggtcaggcgcagtttgccaaaatgaaatcttccgccatcttcattaacgccgggcgtggcccggtagtggacgagcaggcgctgatcgccgccctgcagaacggtgagatccacgctgccggtctcgatgtgttcgaacacgaaccgctggccaaggactcaccgctgctgagcctgccgaacgtcgtcgcgctgccgcatatcggctccgccacccatgagacgcgctacaacatggcggcctgtgcggtggacaacctgatcgacgccctgaacggcaacgtagagaaaaactgcgtcaatccgcaggtaaaataagccataaaaaaacccgggtaacggcggcaaccgccctccccgggttctttttgcatcctgtccatcatcctgcccgttcgccgcagccaacgtcagccagatgaagcattaacgggtggcgttcaccgccgccgtccatgcctgattaaacgcctgatgctgcgccgccagcggcccaatcagcgcattgtactggctggcctgctgggaggtcgggaactgaatgccgttggcgacaaagctcacctgcgtcccctgctgagcgacaaaatccccaacctgaaccagctgctgggtaaagatctgcgcggccgggatcagcggctgcagcgcgtcggctggcgccgtcaccaccttggcgtaaacctgatcgaagaccggcttgagatcgtcagcctgcttcagcgcgccatgcgcggcatcggcctgcattttcgcattctgcagctgctggctgagcacgcccagcgcgccgttcgcctgacgcagcggctcacgctgggtcatataatcctgcgggacgcggatcgcattgacgctgtccactaccgggcgcagaccagcgtccatcgcctggctcacctgctgcgagtaaccgtagatcaccgcgtagtcagagacaaaaggcccaaactgttttttctgatcggcggtcagcgtcggcagacgttcaccgctacgcatcgccgtattctgcaggaagtcgataaacgctttgcgctgatcgccctctttatcaaaacacccactcaggctaaccaccatcaataaggccgccatagccgcaaaccagcgagagcaggactttcctgtcgccatttttttactcctttcagccaaaaaaagcgcacaacggcacacacgtgccagacgctgacaaggatagtccagctcggcctcgcaggataccctttcctgctaatcttacgcgggaaaaacaccattttgcacgccatcgtcgcgctgtagaacgtctgttatgcgcatcacaaatatggtcttaagatcaggtggatcagaacttcataagccattgatattaatataaataaaaagcaacaacccggcactgcgccttaaagcggacgataatcgcacgctttggcacgcgtctggattgcctgcctcgcacttcaatgatttgatgaatgagcgattaacggcgatatgttcgattatcgcacaaatcaaactcaacgacgcgaaggcgacgataataataaacctctgtccctcgctcagtctgccaggaaagccgtatgactaagacaaccatcgacattcaggcctttatcaacgagcaccccttcacccgctaccagtggatgattcttgcgctctgctttatcaccgtcgcgatggacgggttcgataccgcaattatcgggttcatcgcctccgacctggtgcaagagtggggcgtggaaaaatcggccctcggcccggtgatgagcgccgcgctggtgggcctggcggtcggcgccttaaccgcagggccgctggctgaccgcatcggccgcaaaaaagtgctgatcatgtcgatcgtggtgttcggcggattcagcctgctcaccgccttcgccaccagccttaatcagctgacgctgctgcgcttcctgaccggtctgggccttggcgcggcgatgccgaatgccgcgacgctaatgagtgaatatgcgccggagcgccgtcgggcgctgctggtgaacctgatgtttgtcggctttccgatgggatcttcgctgggcggctttttatccgcctggatgatcccgcactatggctggcagagcgtgctggtgctgggcggcgtgatgcccctcctgctggcggtggcattaatattcctgctgccagagtccgtccgctatctggtagtgaagcagcacccggcgcagcgcattgctgctattctgcgccatatcgcgccgctgccgaagacagtggaatttgtactacgcgaagcaggccaggtgaaagagaaatccgcgatcggcgtcattttctctcctcgctacgcggtgggtaccgtgatgctgtgcctgacctactttatgggtctgctgattttctatctgctgaccagctggctgccgctgctcatccgtgaaaccggctcctcgatgagtcaggcctcaattatcaccgccctgttcccgctcggcggcgggattggcgtgctgatcctcggtgccctgatggacaagatcaaccccaataaagtggtggccgtcggctggctgctgaccggcgtttttgtctgcctggtggggttctccaccagcagcctggcgctaatgggagtgatggtctttatcgccggcagcattatgaacggcgcccagtcgtcgatgccggcgctggcggctggcttctatccgacgcaggggcgcgccaccggcgtcgcctggatgctgggtatcggccgcttcggcggcatcctcggcgcgttcagcggcgccttcctgatgcaggctcagctctcctttgagaccattttcaccctgctggccatcccggcgttcctgtcagccattgcgctgctgatcaagtaccgggtcagtaaatccgtgccggcgacgacagatgaggcgagaagcctgcagaaagcctaaccctataagccggcgccccgcgccggctttgccgcttttttcttatccgtttacaaaaattttcgaagccacctcatcgcgttaataatcattcttttaggctacgctgccgtttggctgtcggggcagattcgatagcctgttggcaaataatcaccgacgttaccatcccttgcgccattttctgactattcttaatgagctatagaaaaatcttttccgctgtgtgataaaaggagttctcaatggaatataaagatcccgtgtttgaactgctgagcagcctggaacacatcgtttttaaggatgataatcagaaacttacctcaaaccgtaagtccactgtgtttagtgaatttgaacagctgcgtaaaggcactggacttaagattgacgactttgccaacgtcatgggcgtgagcgtcgccatggtaagagagtgggagtcgagacgggtcagaccgtctcccaccgagctgaaattgatgcgcctgattcaggccaatccacagctttcacgacaattactcgattaatctcgcgcgcagcggcaaaggccagtaagggagcttttgccgctgcaccgtaaaaaaaagtttgctatcaggtgctgaacgtgcgttaatgctcgcaggtttgatgtacagaccacagagcagtcgaatagagcagtccttctaaggttatccaaagatacccccgtagtgaactttccctttatcgctttaaatctgtagtccagacccctacgccgcaaggctcacttatttttttaaaggtaattcactatgtccggtaaaatgactggtatcgtaaaatggttcaacgctgacaaaggcttcggcttcatcactcctgacgatggctctaaagacgtgttcgtacacttctctgctatccagaacgatggctacaaatccctggacgaaggtcagaaagtatccttcaccatcgaaagcggcgctaaaggcccggcagctggcaacgtaacttctctgtaagttcaagccgctaagaatcgagaatccctgcctgatggcggggattttttttatctgtcgccagtagccgccagcataagatggcggctaccgggcattcagagcagggaaaagtgccagcccgtctcccgccacgccagactatgggtcagcttcagaccttgtaaaaacgcctcatcatgcgacaccaccagcatcgcgccgggaaacgccgccagcgcgctttcaatagcctgcgtcgatgctaaatcgagatggttggtcggctcatccaacaaaagcagttgggcaggctcgcgtcgccagagcacgcacgccagcgccgctttcaggcgctcgccgccgctgagcgccgacagcggcagagtgaccttatccgcgcccagctggagctgcgccaggcgggtgcgcaggaggccctcatccagtggggtatcttccaggctcaggtgcgccattaccgacagggataaatccagctgcgtcagatgttgatcgaggtaagcggcgctctccgaaagccggacatcgcctgacgcggcctgctccagccccaacagcgttttcagcaaagtggttttgccacagccgtttggcccctttagcgcgatgcgcatcggaccatcgatacgccagttcagcggcgcagccggcgcatggtcgagctgtaatgactccaccaccagcacctgcttgccggcggccacttcgctacccggcagggtgaacatcaccggattgtcgtcttctatccgctcccgcgcctgctgcacggcggcattcagactgctgttctgttcacgatgctgacggcgcagcgctcccgggcgctcttttgccgcgcctttgtacttcacgcgttcgaaggaggcgatatttagcgtatcaacggtacgcagcgtctgagccgagcgccgctgggcggcgtcatgctccttttgcattcgcgcgcgggtgcgccgtcggtcggtcacggcatgcttcagcgccgcgcgcgcggcctgctgctccgccatacgctggcgctgatattcagcatagttgccgccgtagctgcgcagcgccgtcggcgtcagctcaataatcctcggcatccgcgtcagcagctcgcggtcgtggcaggcgatcagagccccgccctgccagctttccagttggtgatagagccactcccgcccctggcggtccagatggttggtaggctcatccagcagcagataatcggcgcccgagacgaaggcgccgcacagcagagccttcatccgctcgccgccgctgagtgaaaacgcggggcgatcggcagagaacggcgggagatcggcttcacggaacgctaaactcaggcgatcggtgagatcccagtgaccatctaacagatcgaaatcgtcggccagcccttggccctgttcaaggcgagacaaggcggcaaaaaccgacgcatagcccagcagcgtagcgagggtggtctccggcgtgagcgtcggctgctgcgctacccaggcaacggcggcggcgcgctcaatatggccgccggcaggagaatcaaggcccgccagcagacgcagcagacgcgtcttgccgacgccgttccggccgaccaggccgcaaagggacggttccagcgagacgctgagcggaccaaacagggtctgccccgtcgcaaactgacaggtgacctgatgtaaaacaaaagcggggatgtgggcgcaatgagccataagcactcctgaatgaaatcaatactcccctacccgcaaggtctgcgaggtaaggcgtgaaattcatcagtcgtgtttgttcatttgtggggcgcgctccggtgagacgagggattcgtcgggacataggatagccacactccggtatgcgttgcaagcctgttttattcaacgatcttgtaaaaataaaaaggcctcctgatatcaggaggcaaatgatttatttggtgaacaatgaaagggtgcattgagaatgcctgacaccgcaagcatggtggggatagatccccaccagatgctcttactgtttaatatcacaggctaagaatgccaccagctcaatatttccctgcctgcgctgtaattcacatagcgaatcacgaaccatccaggtcaataataaaatagtgaagcaaatcactactaagccaaacaacagatacttttgcggcattcctcgcctccagtgttgattttcaacaagtaagaggctactcttatggtgttcatgcataggggagcctcactttgattactatcaggtggggcttttctctgtctgtctcccgctgaatacctgagacacatagtctcaagcacccgccgccattctagcgtaaatacctctcggaattatgtttatatattcctaaaacgtttcttctcgatgaatgcaaataatgaagatatcaatgacagaattattaacggttcacctattcatatttcacgtataaaaaaacctgccctgaggcaggtcttttattatttccgatacgcttactgcagcagagaaatatccgccacctgcaggaacagttcacgcagtttggacagcagcgtcagacgattgatgcgaacatctttgtcttcagcgttaaccatcacgttctcgaagaactcatccaccggctcgcgcagcgcggccaactcaatcagcgcatcctgataacggcctgcggcgaaatacggctgcagcttgtcgcgcagcaccaccagattacccgccagcttaatttccgccgcttctttcagcaccgaagcgtgaacgatgtcgttcagcgtctcatcggatttcgcgaggatgttagagacacgtttgtttgccgccgccagcgcggaggactcttccagagtacggaagtgcgataccgccttcatacgcgcatcgaaatccgccgggcgggttggacgacgcgccagtaccgcctggatcgtgtcgacgccgtagccttcgtcctgataccaggcacggaagcggcccagcataaagtcgatcacatcatcaaccacgttggcgttggtcagcttctcaccgtacagacgaaccgcttcttcggtcagcgtctgcagatcgagatccaggttcttctcaacgatgatacgcagcacgcccagcgcggcgcgacgcagcgcaaacgggtctttatcgcctttcggatgctgaccgataccaaagatacccgccagggtgtccatcttatcggcaatcgctaccgcgcaggccaccggattagacggcagcgcgtcgccagcaaatcgcggctgatactgctcgttcagcgccacggccacgtcttccgcttcgccgtcatggcgcgcgtagtgcatccccatcacgccctgggtgtcggtgaactcgaagaccatgttggtcatcaggtcgcacttggacagcaggcccgcgcgggttgcgtggttcacgtcagcgccaatctgttcggcaatccagcccgccagcgcctggatgcgatcggtcttgtcgcgcagggtgcccagctgctgctggaacagcacggtttccagacgcggcaggttatcttccagacgttttttacggtcggtattgaagaagaactcggcatcggccagacgcggacggaccaccttctcgttaccggagatgatctgctgcggatctttggactcgatgttggccacgaagataaagttcggcagcagtttgccggcgttgtcgtagaccgggaagtacttctggtcgcccttcatggtgtaaaccagcgcttcagacggcaccgcgaggaatttttcttcgaacttcgccgtcagcaccaccggccattccaccagcgaggtgacctcttccagcaggctttcgctcagatcggcttgaccgccaatcttacgcgccgcctcttgcgcatcagctttgattttggctttacgctgttcgtaatcggcgatgactttaccgcgctccagcaggatctgcgggtactggtcggcatggtcgatggtgaactccggctcgcccataaagcgatggccgcgaatcacgcgatcggacggaataccgaggatagtggccgggatcactttgtcacccagcagcaaagtcaccgtgtgtaccggacgcacgaagtggacgtcagacgcgccccagcgcatcagtttcgggatcggtagcttcgccagcgagctggcaatcatgttcggcagcagcgcttcggtgctttcacccttcacatgggcgcgatacagcagccactcgcctttgtccgtggtcagacgttcggcctgatcgacggtgataccgcagccgcgcgcccagccttcggccgctttgcttggcttgccttcggcatcgaacgcctgggcaatagccgggccgcgtttttccacttcgcgatcggcttgcgccgccgccaggttggccaccttcagcgccagacgacgcggggcggcaaaccattccactttaccgtgcgcaaggccagcgttatccagctccgcggtcacattcgcagcaaaagattccgccaggctgcgcagcgcttttggtggcagctcttcagtgccgatttccaccagaaaagtattctcagacatggccgcctcttatttattcttgttgcacatcgggaagccgagcgcttcacgggaagcgtagtacgcttccgccactgctttagtcagggtgcgaatgcgcaggatatagcgctgacgctcggtgacggagatggctttacgcgcatccagcaggttgaagctgtgagccgctttcagaatacgctcgtaggccggcagcggcagcggggtctccagcgccagcagctgctgggcctctttctcatactgttcgaagcaggtgaacaggaagtcgacgtcagcatattcgaagttataggtggactgctccacttcgttctggtggaacacgtcgccgtaggtggttttccccaacgggccatcgctccagaccaggtcatagacgctgtccacaccctggatgtacatcgccagacgctccagaccgtaggtgatctcgccggtcaccggcttacactcgaggccgccgacctgctggaagtaggtgaactgcgtcacttccatgccgttgagccacacttcccagcccagaccccaggcgcccagcgtcgggttttcccagttgtcttcgacaaagcgaatgtcgtggatagtcgggtccatacccagctctttcagcgacccgaggtacagctcctggatgttgtccggagagggtttaatcaccacctggaactgatagtagtgctgtaaacggttcgggttttcgccatagcggccatcggttggacgacgggaaggctgcacgtaggcggtcgccatcggctccggtcctaacgcgcgcaggcaggtcatcgggtgagaggtgccggcgccgacttccatgtccagtggttgaacaatggtgcagccctgacgagcccagtaatcctgtaaggtcaggatcaggccctggaaggtcctggtatcaaacttttgcatatgatttcgtgctggatacgtgtggatttaaaggaaggagtcagtatacccgctggctgcgagatatacagtacgaaacggcgttgtttcaggaaaacggacgaaatttacgccaggcggggtcgattcagcgcatcgaaagatgcataaactggccgtccgggtcaaaggaacagatgaaacgctcattcttgccggtacggccagaaagctcatagctcgcctggaattgttcaaagtggttcacgtcaacgagctgcgtttgcgtgttatagcggatagccgcctgatccttgcaaagctgcgccatattgagcgtggtttgcggcgtaatacgagcgcgctgcgctttttgcgtcggcggggagacggtctcgctgcagcccgcgaggagcagcaccagcatgacggaaacaacacctttcaccacgttctcctccaccgccttgttagcaagttgttatcctaaagattcagtattacaggtattttgcgaatatcatgaaactgcgacaagtctgtgaccgaaaactcagactaatctattgcgacaccgggaaaccgggcaggtcatatcttatttcgccagcagacattgagggactgatgcaagaaaagatacactggatcaccaacctgcgcggcatcgcctgcatgatggtggtgatgatccacagcaccagctggtatatcactcacccccatgcgattaccctgctgcaatgggatatcgccaatctgctcaattccgcctcccgcgtcagcgtgccgctgttttttatgatctcgggctacctcttttttggggaacgcagcgcccagccgcgccatttctggcggattggcctgtgcattgcgttctatagcgcgctatctctgctgtatatcacgctgtttacccatatcaacgtcgagctgtcgttaaagaatttgctgcagaagcccgtcttctaccacctgtggtttttctttgctatcaccgtcatctacctgctctcgccgctgcttcaggttaagtccaccagtagcacaatgctgctggcgctgatggcgatcctcggcattctggccaaccccaatatggtcagcgttaaagccgccgggattgagtggctgccagtcaacctctatatcaacggcgacaccttctattacgtgctctacggcgtgctgggcagagccattggcaccctggacaccgataaaaaatggctaacaccgctctgcgccgcgctgttcatcgccgccgtgtgggtcatttcccgcggcacgctgcatgagctgcgctggcgcggagacttcggcgacacctggtatctctactgcggaccggcggtgtttgtttgcgcggtcaccctgctgacgctggccaaaaactggcttaacgcgcgtcccctgcccggtatcgcctgcattgcgcgacattcgctggggatctacggctttcatgccctgatagtgcatgcgctgcgcgccagccatctggagctatcccgctggccgctgctggatattgtgtggatatttagcgccgccctgctcggcagcctgctgctgtcaggcctggtgcagcggattgatagccgccggctggtcagctaatggtccgccgcccgggggggcccgacttacgtctcaggcccctcttccgtcacgctgagaggttcccgtaagcgcgtcgggtcccagacatcacgcacgtttttctgtaccgcaacagcgccaaacaggctcaaaaaatacgccagcccatagaaccctttctcgctgagcagcagagtggcattccacagtccgataaccagcagacctacagcgataacgaagaccaccagacaggtggtgtagtacagcgcggtggtcggaatggcttcatacttatcgcgcaccgtcttttgataagatgccgcggcaaacagccccagtaccaggacggcaaaataatagcctttctcattcaactgcatatcggcattccacagccccaccagataggtgacgatgccgccgatcagggcaatccaggagatcaaatgaaacgcaggagaatacgtcgcgtgcttgttttccatcactttttaccttttacgcgcctcggggcggcgcttattccgttttttgcatcgcgcgggcgatgcgggtccgttcgggggttgccgatgcgccatataagcagacaaaccatgccgcgatatagacggctttttcatgccagtctgccggtacataccaggcgccgaccagcagcaggccgaccgatagcagcagcaccagccggcataaggcaataaaaccgtcgtcctgttcctgccactgactggcgcgctgatgggcgagaacagcaaacatccccatcaccagcacgccgagaaaataccctttgccgctgaacagcgggcaggtccgccagataccgagcagataaaccagcgatcctgccgccatcatccccctggcaatattgcgttttgtgatcatctcacctccctggtcgacaggggctgattatgaccgactccctcggcgatgcctcagattacgtacgacaaagcggagatttcggaataaataaatacgcatttatggatggatgtagccgggacattcaggaagggaatccgcccggcgctgccggacggactgaggctaagacatcagcggtttcagttgctgataaatctggcggaaggtttcccgctgcggcgcatagtgggccacacggcgatcgtccgggcgatgggcttgttcaagcggcagcggcttcagcagcccggggcggtctgcctcgtcgtgaaccgccagctgcgccagcctggccgcccccagcgccgggccgacatcgcccccggtacggtaatcgagctgcaggccgctgatatccgccagcatttgccgccagtaagcgctgcgcgccccgccgccgataagcgtgatgctctgcggcttgatgccgcaggcgtgcaccacgtccataccatccgccagcgcatagcccaccccttccagcaccgcccgcgccagctctgccggcccatgctgatgcgtcaggccaaaaaagacgcccttggcctgcgggttgttgtgcggcgtgcgttcgcccgacagatagggcaggaaccacaccggaccggcgctttcatccgccgtctgcgccgccgcgatcagcgccggcacgctggcgagaccggttaattttgccgcccagtccagacaggaggccgcgctgagcatcaccgacatcaaatgccagcggcccggcagggcatggcagaagctgtgcaccgcgctttcgggtttgctaaggaacccttcactgacggcgaagtagacgcctgaggtgcccagcgacagcatcgcctgaccggcatcggccatgccgaccccgaccgcgcccgcggcgttgtcgcccccgccgcccaccaccagcgccggcggcatattccacgcctgcgccacctcaggtcgcagttgcccggtgacatcgctgccttcgaacagcgccggcatcgcatcccgactgagatcgcaggcggcgagcatctcgtcgctccagtcgcgccgggcgacgtccagccacatcgtgccggcggcgtcagacatatcgctggcgagctcgccggtcatgcgcaggcgcagataatccttgggcagcagcactttatcgacctggctgaacaccgccgcctcgtggcgctgtacccataagagcttcggcgccgtaaagcccggcatcatcaggttgccggtgatctgccgggaagcgctgactttgtcttccagcagctggcactcttcggcgcagcggccgtcattccataaaatggccggacgcaacacctgtaacgatttatccagtagggtggcgccgtgcatctgtccggcaatgcccagcgccttcacgtcgcgcaggctatgctgcgcgcccagggctttcatcgccgtgtccgtcgccagccaccactgttcgggatcttgctccgaccacagcggatgcggacgcgagacggtgagtttttcggtatgcgatgccactacctcaccctgctcattgagcaggatggctttgacgcccgacgtccccagatcgatgccgatatacatactccctctccttaaacgcgcgccacggctgagcgtggcgcgaacagagcatcctggttgcggcgccggtcaccccgggcgccgccgcatgattacttgtcaaacagataatggttgaccaggttttccagttgttcctgctggccgctgcgatgctgcggcgccagctgatgctgagcggcatactgggcaatatcgctcagggtcatctgcccgttaaggatctgctgccccagctcaccgttccagccggcgtagcgtctggccacgcgcttatccagttcgccgtcctcgatcatccgcgccgcgaccttcagcgacagcgccatggtatccatcgcgccaatatgaccatagaacagatcgtatttgtcggtgctctgccggcgcactttcgcatcaaagttgagcccgccggtggtgaagccgcccgctttgaggatttcatacatcaccagcgcgttctcttcgacgctgttcgggaactggtcggtatcccagcccagctgcggatcgccgcggttggcgtcaacggagccgaacagccccagcgcaatggccgtcgcaatttcatgatggaacgaatggccggcgagcgtggcatggttagcttcaatattcagtttaatctctttttccagaccaaactgtttgaggaagccgtaaacggtagaggcatcatagtcatactgatgcttggtcggctcctgcggtttgggctcaatcagcagcgtgcctttaaagccgattttatgcttatgctccaccaccagctgcataaagcggccaatctgctcacgctcctggcgcaggtcggtattcagcagggtttcatagccctcgcgaccgccccacagcacatagttttcaccgcccagttgatgggtggcattcatggcggtgaccacctgggtggccgcccagctaaatacttccggatccgggttggtggccgcgccggcgccgtagcgcgggttggtaaagcagtttgcggtcccccacagaagcttcacgccgctctgctgctgtttctcagccagcacctcgaccatccgggcgaagttattgctgtactccttgagcgaagcgccttccggcgagacgtcaacgtcgtggaagcagtagtaaggcacgttgagtttatggaagaattcgaacgccacatcggctttgcgtttggccatctccagggcgtcgccaggctgctgccagggacgatcaaaggagcccacgccaaacatatcggcgccattccagcagaaggtgtgccagtaacaggccgcaaaacgcagatgatcttccatccgtttgcccagcaccagttcatccgggttgtaatgacggaaagccagcgggttagtggatttcgggccttcgtaacgaacgcgatcgagttgatcgaaataggtctgcatagagaactccatattcagagatgcggcgaataaccaatcagataccctaaataattcgagttgcaggaaggcggcaggagcgcaagtccccggtaaccaggggcggagcaacgaatgtcaccaacccacctacaacttgaagtatgacgggtttaagccaatatagaatttcgctttcattttcctcaattacgttatttcacaccgccattgagagaatccacaaacgtgcgccagctcgcaaaaataatatccagtcgccgttgcgccgctctgtcagagacagtccagtgcaataataagagcgtgcatgaataaaatacgatcgccgtcataatttgcacattaaacgaaatttcataacggcaaaataagaaccggtaattgccagccctgctttccgcgttaagaatctgtaacgtatccgcaacctcatgtatcaaacattattttccgttcgtcttacctacccttacaaaaaaggtatcgttattatgaagataaagaacctttgccttacgctttgcgccagctccctcctgctcgccagcatggcggggatggcgaaagaagtgaagattggcatggccatcgacgatctgcgtctggagcgctggcagaaagaccgtgatattttcgtcaataaagcggaatccttaggcgccaaagtttttgtccagtccgctaatggcaatgaagaaacgcagatgtcgcaaattgaaaacatgatcaaccgcggcgtcgatgtgttagtcattattccttataacggccaggtactcagtaacgttattaaagaagccaagcaggaaggtattaaagtcctggcctatgaccgtatgattaataatgccgacattgatttctatatatctttcgataatgaaaaagttggtgaaatgcaggcgcaaagtctggtcgacaaagtgccgcagggtaattatttcctgatgggcggttcgccggtggataataacgctaaactgttccgcgccggacagatgaaggttctcaagccgtatgtcgatgatggcaaaattaagattgtcggcgatcagtgggttgacggctggctgccggagaacgcgctgaaaataatggaaaacgcgctaacggcgaataataacaagatcgatgccgtggtcgcctccaatgacgccaccgccggcggcgccatccaggccttaaccgcccaggggctggccggcaaagtggcgatctccggtcaggatgccgacctggcgggcgtgaagcgcattatttccggtacccagacgatgaccgtctataaaccgattaccaccctggccaccaacgccgctgaaatcgccgttgagctgggtaacgataagcagccgaaggccgataccacgctgaataacggcttaaaagacgtcccttcgcgcctgttaacgccaattgaggtaaataaagagaatatcgacgccacggtgattaaagacggtttccataaaaagagtgaactgtaatggctgacgccccgctgcggggcgtcattttcatcccgccggatatcactgttgcggagtctttatgacctggctactcgaaatgaagaacatcaccaaaaccttcggcgctgttaaagccgtggataacgtcagcctgcgcctgaacgcaggcgaggtgttctcgttatgcggtgaaaatgggtcggggaaatcgacgctgatgaaggtgctgtgcggtatctatccgcacggaagctatgagggcgagattatttttgccggcgaaacgctgcaggcaaaccatattcgcgataccgaacgcaaaggcatcgccattattcatcaggagctggcgctggtgaaacatctcaccgtgctggagaatattttcctcggcgccgagatatcccgccatggtctgctggattatgaaaccatgacgctgcgctgtcagaagctgttggcgcaggtcaatctgcccatttcccccgatacccgcgtcggcgacctcggccttggtcagcagcagttggtggagatcgccaaggcgctgaataaacaggttcgcctgctgatcctcgacgaaccgaccgcctccttaaccgaacaagaaaccgcgacgctgctggcgatcgttcgcgatctgcaaaaccacgatatcgcctgcatctatatctcgcataagctcaatgaggtcaaagcgatctccgatacgatctgcgtgatccgcgacggccagcacatcggcacccgcgatgccagcggcatgagcgaagacgatatcatcaccatgatggtcggccgcgagctcaccgcgctctatcccagcgagccgcacgcccacggcgaggagatcctgcgggttgaacatttaaccgcctggcacccggtaaaccgccatattaaacgggtcaatgacgtctcattttccctgcgtcgcggagaaatcctcggcatcgccgggctggtcggcgccggacgtaccgaggcggtacagtgcctgttcggcgtctggccggggcgctggcaaggggagatctttattgatggccagccggtgagcatctctaactgccagcaggccattgcccacggcatcgccatggtgccggaagaccgcaaaaaagacggcatcgtgccggtgatggcggtgggcaaaaacattaccctcgcggcgctcaaccagttcaccggcgcaatgagtagcctggacgacgccgccgagcagcactgcattcagcagtccattcagcgtttgaaaattaaaacctcctcgccggagttggcgattggccgtctgagcggcggcaaccagcaaaaggcgattctggcgcgctgtctgctgctcaatccgcgcattctgatcctcgacgaacccacccgtggcatcgatatcggggcgaagtatgaaatttataaactgattaaccagctggtgcagcagggcatcgcggtcattgtcatttcatccgaactgcccgaggtgctcggtctcagcgatcgggtgctggtcatgcacgaaggcagactaaaagccaatttggttaatcaacatctgacccaggaacaggtgatggaagccgcgctgaggagcgaacgccatgtcgaagaacacgtcgtctgaaatcaaactcaccccaaccgcccccgcggccctgccggcgctgaaggggctgaatctccaggtcttcgtgatgatcgccgccatcgtcgtcattatgctgtttttcacctgggttaccgatggcgcctacctgagcgcacgcaatatctccaacctgctgcggcagacggccatcaccggcatcctcgccgtcggcatggtgtttgtgattatttcggcagaaatcgacttgtccgttggctcgatgatggggctgctgggcggcgctgcggcgatctttgacgtctggctcggctggccgctgccgctcaccattctggtgacgctggtgatgggcctgctgctcggcgcgtggaacggatggtgggtagcctatcgcaaggtgccctcgtttatcgtcacccttgccgggatgctggcgtttcgcggcattctgatcggcatcaccaacgggaccaccgtctcgcccaccagtccggcgatgtcgcagatcggccaaagctacctgccagacggcatcggcttcggcatcggcgttgtcggcatggcggtgtttatcgtctggcagtggcgcgggcggatgcgccggcaggcgttaggtctggcgacctcgtcctccaccgccgccgtcggccgccaggccattaccgcggtgattgtgctgggcgcaatctggctgctcaatgactatcgcggcgtaccgaccccggtgctgatcctcgccgccctgctgctggcgggcctgtttatggccacccgcaccgcctttggtcgccgcatctacgccatcggcggcaacctggaggcggcccgtctgtccgggattaacgtcgagcgtaccaagctggcggtgtttgccattaacggcctgatggtcgccattgccgggctaatcctcagctcacggctcggcgcggggtcgccttcggcgggcaatatcgccgaactggacgccatcgccgcctgcgtcatcggcggcaccagcctggcgggcggcatcggcagcgtcgccggggcggtaatgggggcgtttattatgtcggccctggataacggcatgagcatgatggacgtcgccaccttctggcaatatatcgttaaaggcgccattttgctgctggcggtgtggatggactctgccaccaagcggcgcgcataaggagagactctctgaagaatgtctgaattctttgcgctaccgccaaacttcgccataaggcgcttgaaatatctcgggcattagccggtagtgtatacccaacatcattcgggttgcagacggcgcccccggccgcgtaccggcgtacgtggccgggatgagtggtaagtcaggccatcggcaacatcttgaatgaaggggtatgaccggggttagagcaggaacattatctatgtttgaaaagcgtcaccgtattacgctgttatttaacgccaacaaagcttatgaccgccaggtagttgaaggtgtcggcgagtatctgcaggcctcccagttggagtgggatatctttattgaagaggactttcgggcacgcatcgaaaacatcaaagagtggttgggcgatggcgtcatcgccgactatgacgatcccgaaatcgaaaagctgctggccgatgtccacgtgcccatcgtcggcgtcggcggatcttatcatcagccagagcagtacccgccggtccactatatcgccaccgacaacgccgcgctggtggaaagcgcttttctccatttaaaggaaaaaggggtgcaccgcttcgcgttttacggactccccgcctccagcggtaaacgctgggcggtagagcgcgagtatgccttctgccagctggtcgcgaaggagaagtatcgcggcgtggtctaccaggggctggagacagcgccggagaactggcagcacgcgcaaaaccggctcgccgactggctgcaaaccctgccgccgcaaaccggcatcatcgccgtcaccgacgcccgtgcccgccacgtcctgcaggcctgcgagctgctgcatatcccggtgccagagaaactgtgcgttatcggcatcgataacgaggagctaacccgctatctctctcgcgtcgccctctcctctgtcgcccagggcacccgccagatgggttatcaggcggcaaaattactccaccggctgttgaataacgaggccctcccgctgcagcgccagctgatcccgccgatgcgcgtcgttgagcgacgctccaccgactaccggtcgttaaacgatccctccgtgatacaggcgatgcattacattcgcaacaatgcctgcaaaggcatcaaggtggaacaggtgctcgacgccgtgggcatctctcgctctaatctggaaaaacgcttcaaagaggaggtcggggagaccatccacacggtgatccacagcgaaaaactggaaaaggcgcgcagcctgctggtgtccactagtctgtcgatcaatgagatttcgcagatgtgcggctatccgtcgctgcaatatttctattcggtgtttaagaaggagtacgacgtgacgccgaaggagtaccgcgatcggcacagcgaggtgatgctgtagggtaaaaaatgcccggcgacaaggccgggcatccggattacagatgggcggcgatgagccgctgattgtcctgatacatcgcgaagagatagttgttgtagctcgaccctttggtcgaataccccttcagcttatgaatcatggtgctggcggttacttcctgatccgccttgcgcagctgcaggcgcgacttgcggaaagaagaataggccgggtgggtgttcaggtttgttacgtaagcctgcaccgactgctctaccgactcaaactgcgagtaacctttcatcgcgccgcggcagcgaccggcgccgcacttcatgccgaacaggttgttattctcgcgcgccagcctggaggtaccccagccactttccgccgccgccatggtcgccaccatgctgttcggaataatgtcgacacgctcaagcagcgcgttccagggcacatgacgcgtattgcctgaccacttcaccttataacgggaagcgatatccttcaggcgcgccttctcagtcggtgaccagcgagcatcgtactgcttggaaataagccagttacgatccgcagtaatcgcctgattctgcttggtaatataaggcatgaccgtccggagaaacgcttttttccttggtgttccggaagggtattttcgcaagtcaggaagtgaactgctctttacactattgcgagaatactcttgtttactgcttaccttagtactacttatcttctttaccgttggggctttatgactctttgtcgctgtgtgcgttgtcgccaacacactacctgaaaagatgcaggttagtaacataagtatggcggccccatatcgtcgtatgggattcgatatcatcaggtctcctggtcggatatatgcattccaacaccttgtttttcacaaaaaaacgatagctgaatcgctaatagtatcaaaaatacgcactgagggcatcaacagaaatagtccaattccgaattgctgtcatctgaaatcggtttctgcggcgcatcgccagcgcgaaaatgctagcttcgtctcatttttagcctattttttgagcggtgtcactcaccccttttcatcctcctggtaaaacgcgcgtcaggaggagttcacccgcgcggcgacaaggcacactagataaaaaccgctcacaggatctcgcaatgaaactcgctgcgcttgccacgttattcgtgcctgggatggcttttgccgcctggactaccaccgactttcctgcttttaccgaagaagggaccggccgattcatcagccagaaagtggttgagaagggtacacgtcccctgcagctaaattttgaccagcagtgctggcagccttccggcggcattaagctcaaccagatgctgtccatggagccctgtcgcggcacaccgccgcaatggcgcatcttccgccagggtctgtataccctggaggtggatacccgttccggcacgccaacgatgatgatttcgctggaggaaaaagagaccagcgccgcggcgccgcagatccgccagtgtccgaagtgggacggaaaacctctgaccatcgacgtcagcaaaaccttcgccgagggcagcaaggtccgcgatttctacagcggtaatgtcgcgaccgtcagcggcggcaaaatcaccctgcagcccgccttcggcagcaatggcctgctgctgcttgagcgcgccgagacggccgccccggcgccgtttgactggcacaatgccaccgtctacttcgtcctgaccgatcgcttcgtaaacggtaacccggccaacgacaacagctatggtcgccataaagacggcatgcaggagatcggaaccttccacggcggcgacctgcagggattaaccagcaagctggattatctgcagcagatgggagttaacgccctgtggatcagctccccgctcgagcagatccacggctgggtcggcggcggcacgaagggcgatttccctcactacgcctaccacggctattacacccaggactggtcgaaactggacgccaacatggggaccgaagcggatctccgccgactggtggatgaagcgcataagcgcggaatacgtattctgttcgacgtggtgatgaaccatgccggctacgccaccctggccgacatgcaggagttccagttcggctccctgtatctgcaaggagatgagctgaaaaaaactctcggcgagcgctggacggactggaagccgggcgcgggacagacctggcacagctttaacgactatatcaacttcagcgacaaagccgggtgggagaaatggtggggtaagaagtggatccgcaccgatatcggcgattacgacaatccgggctatgacgatctcaccatgtcgctggccttcctgccggacctgaaaaccgaatcgaaggaggtctcaggcctgccgaacttctataaccataaaccagacaccgcagcgaaagcgatcccgggctatacgccgcgcgactatctgacacactggctgagccagtgggtacgtgactacggcatcgatggcttccgcgtcgataccgccaaacatgtggagatggacgcctggcagcagttaaaaacccaggccaccgccgcgctggcggagtggaagaaagccaatccggataaagcgctggatgcggcgccgttctggatgaccggcgaagcctggggacatggagtgatgcagagcgattattatcgccacggttttgatgcgatgatcaatttcgactaccaggaccaggcggcgaaagcggcgacctgtatggccaatattgacctcacctggcagcaaatggcggacaagctgcagagctttaacgtcctgagctacctctcctcgcacgatacgcggctgttccgcgaaggcggcaccaccgcggcggagctactgctgctggcccctggcgccgtgcagattttctatggcgacgaatcatcgcgcccgttcggccccaccggctcggacccgctgcagggtacccgctcggagatgaactggcaggatgtcaacggcaaggcggcccgcagcgttacccactggcagaagatcggccagttccgcgctcgccatccggcaatcggcatgggcaaacagacaacgctgtcgatgccacgtggttacgggttcgtgcgtgagagcggtgaagacaaagtgatggtcatctgggccgggcagcagcagtaatccacatgtggctctccgccctgcggggagccaccattcagaacaaaatgctaacaaaatagcaatatacaggataaagataaaaatccgcctcctcccgccgatttgcaccacgccagcgctggcgttatggttagccactttccagaaccaccgatagactattcgcgatgacattttcccttttcggcgacaaattcacccgtcattcaggcatcacccgcttgatggaagaccttaatgacggtctgcgcacgccgggcgctattatgctgggcggcggcaaccccgctcagatcccggaaatgaatgactacttccagcagctgctggccgacatgctggataatggcaaagcccttgatgcgctttgtaattatgatggtccacagggcaaaagcgagctgctggctctgctggcgaatatgctgcgcgacgagctgggctgggagatcgaaccacagaatattgcgctaacaaacggcagtcagagcgcatttttctacttatttaatctgtttgcaggccgtcgggcagatggcaccacccgtaaggtactgttcccactgacgccggaatatatcggctacgccgatgccggtctggaagaggatctgttcgttgccacccggccgaacatcgaactgctgccggaaggccagtttaagtaccatgttgattttgagcatctgcaggtgacggaagagaccgggatgatctgcgtctcgcgccccaccaacccgaccggcaacgttatcactgatgaagagctgatcaaactggatgcgctggcgaatcagcacggggtcccgctggtgattgataacgcctacggcgtaccgttcccgggcattatctttagcgacgcccgaccgctgtggaatccgaacatcgtgctgtgtatgagcctgtccaagctgggcctgccgggcagccgctgcgggattatcatcgccaacgaaaaaatcatcaccgccatcagcaacatgaacggcattatcagcctcgcccctggcggcatcgggccggcaatgatgtgcgaaatgattaaacgacaggatctgctgcgcctgtcagagacggtgatcaagcccttctattaccagcgggtgcaggaaaccatcgccattattcgccgctatctgccggaggagcgctgccttattcacaaaccggagggggcaatcttcctctggctgtggtttaaggatctgccgatctccaccgagctgctgtatcagcggctgaaaaagcgcggcgtgctgatggtgccgggggattacttcttccctggtctggataaaccgtggccgcacacccaccagtgtatgcgcatgaactatgtaccggacccgcaaaaaatcgaagccggagtgaaaatcctcgccgaagaggtagaatttgcctggcgcgaacaggaagcatagtctcggacgccgcgggcgggtaacgttcgtcagcgaccccattcatgccagcgccagccgctggcgtttttgcgcgcatagcgcttccagctctgcgggaaccatcacccgcagcgcctgcgtcgggcaggcggccacgcaggccggtccttcggcgcggtgatggcatagatcgcatttcaacgcctgcgcctgctggttcattaccgtaacggtcatcgcgccgtacgggcaggccaccatgcagcttttgcagccgatgcagcgccgctggtcgacccaccagacgtcattgtcgcgctgaatcgccccctgtgggcaaacgctggcgcagggcgcatcctcgcactgccgacaggccatcgccgtcgatatgtcaccgcttttcaccacccggatacgcggcgcgaaatggttcgtcgacagggcggcgacatcctgcgcctgctggtgcgccaccgcgcaggccacttcgcaggtacgacagccgatgcaccgctgggcattggcaataagaaactggttcatcctctgctccctggggataaaaccgcagggtgccagaatatcccctgcccgcgctttgatcctgaatggaatcagcgctgttttttgtcagatggcctgcaggatgtggtcatttgcctgacgcttcacgcaccgtgaaacccagctcacgcgaaattgcttcggcggtctcacgtagtggttttaacaagttcttttcgccagctccccggcacgaagtccgccggggagccgacgttaatgattaccggaacaatgccttatcgcgcaggatatgatcgttgccgcgacggcgggtgaagccaatccgatcgaaatactccaggatctggatcgccagcttccgcccgacgtttaaggtatcgcggaaatccgccgcgcaggttgaaccgcgcagccgatccagctcgcgcacccgctgggcgaactgcacaatgcgatcgttgcggtagtaacgatccttgacgatcgcagtaatcatcccctgctgcgccgcctggcgcagcaccgcgcgcatcagggactcttcaacatggacttcgcgcgcaagatcgcgcacccaccacggatcgtcgccgaacagagtctccaccttatgccagaccgcctgctgctcgtcggtaaacccggctttatgctccggcaaatgcagccagccgtgatggctgtggactaagccgctctcgcgcatctgctcaatcagcagcagcaccagcgcttcatcttccatcggcagcgcgatgcggcgcaggcgctcccggccagggcccggctcgtctcgatgctgctcatggtagcgcgcaagggcatccagcaattttcgctgccagcgggcggcaagcggcgcgctaagcaggcgctgtccggcctgcagatagtccggtcgctggatcagggccgccattccggcttcgctgagctgccgcgcccaggcgaagtgctcaagccggacggcatcccgctgcagatgcagctccagcgcctgcgcatcgtcagcgccgaccgctgccagggcgtgcagccactgcagatattccggtttacgtttgccgcggcgcggaggatccagcgtcaccacccgtgcgcccgccagcgtcaagcgagcggagatatcgcggagcaccagccggtcgttatccgccagccacagcggagtatccagcaccagctccgccaggttgtcctcaaggagcgacacccggccggtaatgtggctggcagcatggtgaatatgcagcggctgccactggctgagcggcgtatggcactgcagctcgacaatcacccgttctgctggctccggcggtggtgaggagagcagccagtcgccgcggtgcactgcctctttttgcgcatcgccgacaatgttcagcgcaatgcgctgtccggcgtgcgcctgctcaaccgcttgattctgggcatgcaggccgcggacgcgcatcggcgtgttgacgccggtaagccatagggtatccccgacccgtacttcgccggagagcgccgtcccggtgaccaccagccccgcgcctttgacggtaaaagcgcgatccagcgccaggcgaaaccgctgctgctgcgggcgggggcgctctgcaagctgcagcagatggctgcgcagttccgcaataccgatgttttccgccgccgcggtgggaaagaaagcgacggcgtcaaagcccagctcgcccagggtctgctcgacctctgcctgaacctccgccaccctggcggccgtcacgcggtccgttttggtcagcgccacggtcagcgtcggctttccggtcagctgcaggatcgccaggtgttcgcgggtttgcgccatcaccccgtcatcgcaggccaccaccagcagcgcatggtcaataccgcccacccccgccagcatgttggacaaaaacttttcgtgcccgggaacgtcaataaatcccagcacccgcccgtccggctgcggccagtaggcatagccgagatcgatcgtcattccccgcgctttctcctccggcaaacgatcggcattcacgccggttatcgcctgcagcagcgtcgttttgccgtggtcaacatgtccagcggtggcaataatcatcgtaacaacatctccataaagcgggtttcatcttccagacagcgcaggtccagccagagccgaccgtcataaatgcggccaatcaccggacacggcagcgcgcgccagcgggccgccagcgcctccagccggctaccgcggccgtcatgcggggtaaaggtcaacgccgcgctgggcaggcggtcgacgggtaacgagccgctgccaatctgcgactggcaggctgccacgctgacggcaaaatcagcatagtgtgccgccaggtcaggctgcaggcgttcagccagccggcggatctcctccgccggacgggtgagcaggcgcagcgtcggcaatttctccctcagcgcctccgggtgctgatagaggcgcagcgtagcctccagcgccgcgagggtcattttatcggcgcgcagggcccgcttcagcgggtggctttgcagctgggcaatcagcgcgcgtttgccgacgataatcccggcctgcgggccaccgagcagcttgtcgccggagaaactgaccaggctcaccccggcggcgatcatctcctgcggcatcggctcctttggcaggccatactgactgagatccaccagcgacccgctgcccaggtcggctaccaccggaacatccagttcgcggccaatggccgccagctccgcttcgtcgacggctttggtaaagccctcaatactgtagttgctggtgtggaccttcatcagcagcgcggtattgtcattcaccgcctggcgataatctttggcatgggtgcggttggtggtacccacttcgtgcagctggcaacccgcctggcgcatcacgtcggggatgcgaaatgccccgccgatctccaccagttcgccgcgagagaccaccacttcgcgaccgctggcggtggccgccagcatcagcagaacggccgccgcgttgttgttcacgatacaggcgtcttccgcgccggtgatctggcacagcagatcggcaatggcgcgatcgcgatggccgcgcccggcgtcgtcgagatcatattcgagcgtcaccggcgcgcgcatcgcgctggcgaccgcctccacggccgactccgcctggatggcgcgccccagattggtatgcaataccgtaccggtgagattaaacaccggacgcagggcactccgctggccggcggtgagccgctgctcacaggcgtgctgccagtcatggctccagtcagggagcgtctgccgttggctaatctgttcccgcgcctcatccagcatctggcgcagctgcgccaccacctgcgaatggccgtgctgcgccagcaggggagaaaaagcggggtcgcgtagtaagcggtcaatggccggaagccgggtataaagcgcacgaatttcggtagtcatgaatgggcctggcggtaagttattttcccccctcccgacgggagagggagtcaacaatcagcggcgattgtaacgcctccttgcgcaaactgttacctgcctgggtcaagtccgcggcggttcagtgcgcgcaaagctggcgcgctggaacaacgcatccaccagcttcaccagctgcggccgggtggcgcaccagcccggcgctacgcggcgaaagttcagataagcaatggcgcaggccgtggaaatggtcgccagattaacctcgtcgccgcgcagcgttccgtctgccgcgcaggcttccagcctgtcgagaccgcgagccactttctcccgctggcggagcagttcttgctctgactgttgcgcgcccgggcgagccttttcacgcaccagcgcctgggcggcctccatcacgccatccgccagcgcctctagctggcgcatcctgagagcggctctggggtcggcggggatcatcggcggcgccacgcccagcagctccagatactgggcgatgaccggggagtcaaaccagcactcaccgtcgtccgtcaccagcgccggtaccttgcccagcgggttatagcgcgccacaccgttgctttcgctgtagggggattcgttgacaaactcaaatgggatgcgcttttccagcaggatcaccgatattttgcgcacaaagggactggtgtagctgccgatcagtttcatagcctgctccttatcgccaacaaattatcgccaacaaagatatgagtatggctcagggcaggacaaaaggcaggtgagcgtccggctcaacctgccgccgatcgcattaatgatcgagatagaggtagtgcatccagctggtcatccgcagcagcactttacgcatcaccgagacgtgggtgaaatggtcggagtagaccgctacctgcgcgtagacaccatcgggtaatgctgatagcccttgttcaagcgatcgcgttccgtcgacacgcgggtggtgttggcctggcctcagagagctgcggcttggggacgttaatacagtacagcgtcgttacctggttggcctgcaggcggtcgactcgcgcctgatagggcgccgggtcaatagtaaatagcgcctcgcctttctcgacgcgctgagtggctctatcggttcggctttacgggaattatttatctgattttattcacaatatactaatattcgccccgctattttgagcataattcacgcctttcatttatgccatccggcgtaaaaaagttattcggcaattaaggttgcttagttacagggtcatcccggcgtggaagcaaaaccgggccgagatcacagcggcgtaaacccctcgcgaaattctttgtgatcaaaatcacaaacaaacaacaaaaacacgaaacaaaaatgtgacaaatatcacacaaaaaggcaaatcagcggctaaaaaggcgctgtgttgtttttttacacagtaattttgtgatcatcatcactaaaaaaccctcttagcaccctatattcatgtgatccaaatcacataaaagggcgctggctggacagctaaacgattcagtgccagatttcgcactatcaatcagggcccggctacctctgccgccacattaacaacaaacctcgggctttaagcctgcgcgctacgcaaaacagaagaaggggtgttttatgtcatccgatatcaagatcaaagtgcaaagctttggtcgtttcctcagcaatatggtgatgccgaatatcggcgcgtttatcgcgtggggtatcatcaccgcgcttttcattccgacagggtggttgccaaacgaaacgctggcgaagctggtcggtccgatgatcacctacctgctgccgctgctgatcggttacaccggcggtaaattagtcggcggcgaacgtggtggcgtggtcggggcgatcaccaccatgggcgttatcgtcggcgcggatatgccgatgttcctcggctcaatgattgccggcccgctgggcggctactgcatcaagaagttcgataactgggtagacggtaagatcaaatccggttttgaaatgctggtgaataacttctccgccggcatcatcgggatgatcctcgccattctggccttcctcggcattggcccggcggtcgaagttctgtcgaaaattctggcggctggcgttaactttatggtggcgcacgacatgctaccgctggcgtctatcttcgtcgaaccggcaaaaatcctgttccttaacaacgccatcaaccacggtatcttctcgccgctgggtattcagcagtcccacgagctgggtaaatccatcttcttcctgattgaagctaacccgggtccagggatgggcgttctgctggcgtacatgttctttggccgcggcagcgcaaaacagtctgcaggcggggctgctatcatccacttcctgggtggtatccatgaaatctacttcccgtacgtactgatgaacccgcgcctgatcctggccgttatcctcggcgggatgaccggtgtcttcaccctgactatcctcaatggcggtctggtttccccggcttccccaggctctatcctggcggtactggcgatgacgccgaaaggcgcctacttcgctaacatcgccgcgattatcgcagcgatggcggtctccttcgtggtctctgcggttctgctcaagaccagcaaagttaaagaagaagacgatatcgaagccgcaacgcgtcgtatgcatgacatgaaagcggaatccaaaggcgccagcccgctggcggccggtaatgtcaccaacgacctgagccatgtgcgtaaaatcatcgtcgcctgcgacgccgggatgggttccagcgctatgggcgccggggtactgcgcaagaaagtgcaggatgccgggctgagcaacatctcggtcaccaacagcgcaatcaataacctgccgccggatgttgacctggtcatcacccaccgcgaccttaccgagcgcgccatgcgccaggtgccgcaggcgcagcatatttcgctgaccaacttcctcgacagcggtctgtacaccagcctgaccgagcgcctggtcgcggcccagcgccacatcgacaacgaagtcaaagtcaccgatagcctgaaagacagctttgacgatactaacaacaacctgttccagctgggcgcggataacatcttcctcggtcgcaaagcagccaccaaagaagaagcgattcgcttcgccggtgagcagctggtgaaaggcggttacgttgagccggaatatgtgcaggcgatgctggaccgcgaaaaactgacctcgacctatctcggcgagtccattgcggtaccgcacggcaccatcgaagcgaaggaccgcgtgctgaaaaccggcgtcgtcttctgccagtacccggaaggcgtgcgcttcggtgaagaagaagatgaagtcgcgcgtctggtcatcggcatcgccgctcgtaataacgagcacattcaggttatcaccagtctgactaacgccctggatgacgaaaccgtgattgagcgcctggcgaaaaccaccagcgtcgacgaagttctggcactgttaaataaataatcagcgctatccaaccctctcctttgggagagggttggggtgaggggaaaggcctcaccccagccctctcaggtgaaaacattaattgaaggttaatactatgaaagcattacattttggcgcaggtaatatcggacgtggctttatcggtaaattgctggccgacgcgggcatcgaactgacgtttgccgatgtcaatcagaccgtacttgatgccctgaatgcccgtcatagctatcaggttcacgtcgtcggtgagaatgagcaggtggacaccgtctccggcgtcaatgccgtcagcagcatcggcgatgaggttgtggacctgatcgctgaagtggatctggtcaccaccgccgtcggtcccgtcgtgctcgagcgcatcgcgccagcgatcgccaaagggctggcgcagcgcaaagcgcagggcaccgaacgccccctgaacatcatcgcctgcgaaaatatggtgcgcggcaccacgcagttaaaaggccacgtgtttaacgcgctggcggaagaacataaagcctgggtggaagcgcatatcggctttgtcgactctgccgttgaccgtattgtgccgccatcggcttccgccactcatgacccgctggaagtcaccgtggaaacctttagcgaatggattgtcgataagactcagttcaagggcgcgctgccgactatcccggggatggaattaactgataacctgatggcatttgtcgaacgcaagctcttcaccttgaacaccgggcatgctataaccgcctacctcggaaaactggcgggccatcagacgattcgcgacgcgatcctcgacgagaaaattcgtgccgtcgtgcagggcgcgatggaagagagcggcgcggtgctgatcaaacgttacgcctttgacccgcagaagcacgcggcttatatccagaaaatacttggccgtttcgagaacccgtacctgaaagacgatgttgagcgcgttggccgtcagccgctgcgcaaactgagcgctggcgaccgtttaattaagccgctgctgggtacactggaatacgggctgccgcaccgcaacctggtgaaagggattgcggcggcgatgcatttccgtagcgaagacgatccgcaggcgcaggagctggcggcactgatcgccgacaaggggccgcaggccgcgctggcgcagatttccggcctggatgccgcaagtgatgtcgtcgcggaggccgttaacgactacaacgcggaaaaatgatgcacaacctggcgcggccgacgtcgcgcccattacgactcctgtcagatatgcaggcaatgatggaagaaacacaagcatttgaaaaccgtgtgcttgagcgtctgaatgctggcaaaaccgtacgaagcttcctgatcgccaccgtcgagctgttaacggaagcggtcaatattctggtgcttcaggtgttccgtaaagacgactacgcggtgaaatacgccgtcgagcccttgctggagggcagcgggccgctcggcgatctctctgtacgcctgaagctgatttatggccttggggtgataagtcgtgccgaatatgaagacgctgagctgctgatggccctgcgcgaagagcttaaccacgacggcaatgagtacagctttaccgacgacgaaattatcggtccgttcggcgagctgcactgcgtcgccgccctgccgccaacgccgcaatttgatgacagcgatgccgaactgctggcaatgcagaaactgcgttaccagcagatggtgcgctcaacgatggtgctgtccctgactgagctgatttcacgaatcagcttaaaaaaagcctttcagaaatcaacgctctgattccggttccgtctggtcgcaggtcggccggtaaagctgacgataatattccagacgctgcaggaacaacgcttccttatcctgaggaatgtctcgcggtacatgctgcagacgcggagactttttcaaatactccataaacgcctgactggaagccataaaatcaaccgctttgtcgattaaacgtggtacgccgtcgccgatctttgccatcacgtcctccttttgggaataatctgattaagcattagccaattcaccagcgtgggttaaggaaaacgtgcttatctgccgacaggcttcacagaaatgaaattagaacgggtattaggcggaatattaataaaattcaaattattagcgataaatgatattgcattccgcgggcgacaaacggcgaatttttgataaatagctatcaacaatagcggtcacggcacatactataggcgaatgaagcccctttattaacagatcaaatcaccatgaaagaagtcgaaaagaatgaaatcaagcgtctgagcgatcgtctcgacgccatccgccaccagcaggccgagctgtcgctggtggaagccgccgataaatatgctgaactggaaaaagaaaaagccactctggaaacggagattgaacgtctgcgttccgtccagagccagaagctgagcaaagaggcgcagaaactgatgagcctgccgttccgccgcgcgattaccaaaaaagagcaggccgatatgggcaagctgaagaaaagcgttcgcggcctggtggttgtccatccgatgaccgccctgggccgggaaatgggtctgaaagagatgaccggtttcgcccgcagcgaattttgatccccagccctctccgtacggagagggctattctgtcttcactcccccacatttttaccttcagccgggtcgattggtccaaccaataatttcatccaccccctggcagttcacaaatccgtcaaaacccatcacaaacacgttgcttaagagtaacatctgattaaccattcattgtcatcaaccctgatacccttaattggccgggccaattttacttttggtgggatcggcaatgagcgcagactcagccctcctctcctggcggcccgatggagaccctgcatgaatctctggcaacaaaactacgatcccgccggtaatatctggctatccagtcttatcgcatcgctaccgattctgtttttcttttttgcgctgattaagctcaaactgaaaggctacatcgctgccacctggaccgtcgcaatcgcgctggtcgttgccttactgttctataaaatgccggtggaccgcgccttagcctcggtggtctacggcttcttctacggcctgtggcctatcgcgtggattattatcgccgcggtcttcgtctataaaatctcggtgaagaccggacagttcgacatcatccgctcatcgattctgtcgattacgccggaccagcgcctgcagatgctgatcgtcggcttctcgttcggcgcctttctcgaaggggcggcgggtttcggcgcaccggtggcgattaccgccgcgctgctggttggtctcgggtttaacccgctgtatgcggctggcctgtgcctgatcgtcaacaccgcgccggtggccttcggcgcgatgggcatcccgattctggtcgccggccaggtgaccggtatcgatagcttcgccatcggccagatggtgggccgccagctgccgttcctgaccattatcgtgctgttctggatcatggcgattatggacggctggcgcggcattaaagagacctggccggcggtgatagtcgcaggcggttcgttcgctattgcccagtacctcagctctaacttccttggcccggagctgccggatatcatctcgtcgctggtctccctggtctgtctgaccctgttcctcaaacgctggcagccggtacgcatcttccgcttcggcgatctcggcgcctcgcaggtggatatgacgctggcccgcacacgctacacggcgggacaagtgatccgcgcctggtcgccgttcctgttcctgaccgccaccgtgaccctgtggagcgtgccgccattcaaagcgctgttcgctcctggcggcgcgatgtatgacttcgttatcaatatttcggtaccattcctcgacaaaatggttgcccgtatgccgccggtggttagcgccgcgacgccctacgccgcggtgtataaattcgactggctgtcggcaaccggcaccgccattctgttcgccgccctgctgtccatcgtctggctgcgcatgaagccgaaagatgcgctgaccaccttcgccgggacgctgaaggatctggcgctgccgatctactctatcggcatggtgctggcgttcgcctttatctctaactattccgggctgtcgtcgaccctggccctggcgctggcccataccggccacgcgtttaccttcttctcgccgttccttggctggctgggggtattcctgaccggttcggacacctcgtctaacgccctgttcgccgcgctgcaggcaacggcggcgcagcagattggcgtctccgatattctgctggtcgcggccaataccaccggcggcgttaccggcaagatgatttccccgcagtcgatcgccatcgcctgcgccgcggtaggcctggtgggcaaagagtcggatctgttccgctttaccgtcaaacatagcctgatcttcacctgcatggtggggctgatcaccacgctgcaggcctacgttttaacctggatgatcccgtgatagtgatgcctaaacgcctggccgacgacgtggcgcgtcgcgtccgggcgctgattgaagaacaacagctggaggcgggcatgcgactgcccgccgagcgccagctcgccgcccagctcggcgtctcacgcaattccctgcgcgaagcgctggcgatgctggtcaatgaaggggtgctgttgagccgtcgcggcggcggcaccttcgtccgctttcagcatgagccgtggtcagagcaaaacatcgtccagccgctgaagacgctgctggccgatgacccggactacagcttcgatatcctcgaagctcgccacgccatcgaagccagcaccgcgtggcacgcggcgatgcgcgccaccgacgccgataaagaaaaaattcgtctgtgctttgaagcgacccagagtgaagacccggatatcgcctcgcaggcggatgtccgctttcacctggcgatcgccgaagcctcgcataacgtggtgctcctgcaaaccatgcgcggctttttcgacctgctgcactcctccgttaagcagagccgccagcgcatgtatcaggtgccgccggtgtttgcccgcctgaccgaacagcaccaggccgtcatggaggcgattgtcgccggcgacgccgaggcggcgcgccaggcgatgatgggccacttaggctttgtccacgccaccatcaaacgttttgatgaagaccaggcccgccaggcgcgaattacccgcctgcccggtgaccacaatgaaaattccagggagaactcgtgatgattatttccgccgccagcgactatcgcgccgccgcacagcgtatcctgccgccgtttctgttccactatattgacggcggcgcctacgccgaacataccctgcgccgcaacgtcgaggacctttccgatgtagccttgcgccagcgtattttgcgcaatatgtcggacctgagtctggaaacgacgttattcaacgagaagctggcgatgccgacggcgttggcgccggtcgggctgtgcgggatgtacgcccgccgcggcgaagtgcaggccgccggcgcggcggacgacaaaggcattccgttcaccctctctaccgtttccgtctgcccgatcgaagaggtcgccccgaccatcaagcgcccgatgtggttccagctgtatgtcctgcgcgaccgcggctttatgcgcaatgcgctggagcgcgccaaagccgccggctgctcgacgctggtctttaccgtcgatatgccgactcccggcgcccgctaccgcgacgcccattccggcatgagcggcccgaacgccgccctgcgccgctactggcaggccgtcacccatccgcagtgggcgtgggacgtcggccttaacggtcgcccgcacgatctgggcaatatctccgcctatctcggcaaaccgaccgggcttgaggattacattggctggctggcgaataacttcgatccgtcgatttcatggaaagacctggagtggatccgcgatttctgggacggtccgatggtgatcaaagggatcctcgatccggaggacgcccgcgacgcggtgcgcttcggcgctgacggcattgtcgtctccaaccacggcggccgccagctcgatggcgtgctctcctcggcccgcgccctgccggcaattgccgacgcggtgaaaggcgacatcactattctcgcagacagcggcatccgcaacgggctcgacgtggtgcggatgatcgccctgggcgccgacagcgtactgctgggccgcgcttacctgtacgccctggcgacccacggtaagcagggcgtggcgaatctgctgaacctcatcgagaaagagatgaaagtggcgatgaccctcaccggggcgaaaagtatccgtgaaatcagccgtgattcgctggtgcagaacgccgaagcgctgcagaccttcgatgcgctgaagcagaataacgccgcgtaattctccacgttttcccttacgccgcccctctccctcagggtgagggttcaacaaatatctgctattctgccccccgcaattaagggggcagtatgctgaacatcgtgttattcgaaccagagatcccgccgaacaccgggaatattatccgcctgtgcgccaacacgggcttcagtctgcatatcattgagccgatgggcttcacctgggacgataaacgcctgagacgcgccggactggactatcacgagttcactgccgtgcagcgccatgcggattacgcggcgtttgtcgccagcgcgcagccgcagcgtctgttcgccctaaccaccaaaggcacgcctgcgcacagcgcagtgagctatcaggacggcgatttcttgatgtttggcccggaaacccgcggtctgccggccagcatcctcgatgccctgccgccggagcagaaaatccgtattccgatgatgccggacagccgcagtatgaacctgtcaaacgcggtgtcggtggtggtgtatgaagcctggcgccagctggggtatcctggcgcggtcttgcgcagctaacctgagcggttcccggattgcagcgcaaggagccttatccgggcgacaggctggcgggatgagatcgtaggcccggtaagcgcagcgccaccgggcaagacgttaaatcccgtcgccgtactcgaaagtgtggtgaataccgttgaaatgctgatccatatccatcgccggcttatcgctctccggcttgccgacgatgcgcgcaggaacacctgcggcggtggtatgcggcggcaccggctgcagcaccactgagcctgcgccgatttttgccccacgcccgacttcgatattgccgaggatcttcgctccggcgccaatcatcacgccttcgcgaattttcgggtgacggtcgccgctggttttaccggtaccgccgagggtgaccgactgcagaatagagacgtcatcctcaatcaccgccgtttcaccaaccacaatgccggtggcgtggtcgagcatgatcccgcggccgattttcgccgccgggtggatatccacctggaaagagacggagacctgattttgcaggaaaatcgccagcgcgcgtcgcccctgagtccacagccagtggccgatacgataggcctgcagggcatggaaacccttcagatagagcaacggcgtggagtatttatccaccgccgggtcgcgcgtgcgcaccgcctgaatatcgcaggcggcggaggcgatcatttccggatcggcggcgtaggcctcttccaccacttcgcgaatggcgatcgccggcataatcggggaagccagcttgttggccagcatatagctcagcgcgctgccgagattttcatgcttgagtagcgttgcgtgataaaaactggcgagcatcggctcacagtcagccaaagcccgggcttcggctttaatattattccagacgatatccagttcttcacacggcattgcatactccaggcgatatagtaatgacctgccagttctgcgctggcagggtcattcaggtgacaaaggaaagctaattgctgctgcgctcgtccttgcgggcgcgacccaataaggtcaatgctgcctcgcgcgcaatttttccgcaatacaatacctgataaatttcctcggttattggcatttcgacacctaaacgctgtgccagaacgcgaacttccttggtattgcggtagccttcaaccacctggccaatcttgtcctgggcgctctgcacgtccataccctggccgagcatcatgccgaagcgacggttacgggactggttgtcggtgcaggtgagcaccaggtcaccgaggccggccatgcccataaaggtttccggatcggcgcccagcgccgcgccgaggcgggacatttccaccagcccacgggtaatcagcgccgtacgcgcattggcgccgaagccgatgccatccgacatacctgccccgatggcaatgacgtttttcaccgcgccgccgagctgcacgccgataaagtccgggttgatgtagacgcggaagcttttgccgcagtgcagtaggcgctgaaggtcttccgcaaactgcggatccgtggccgccagcgaaatcgccgtcggcaggccggcggccagctctttggcgaaggttggccccgagatcaccgccagcggaatatcatcgcccagcgcttcacgcgccacgtcctgcagcagacggccggtttcggcctccaggcctttggtggcccacaccagccgcgcgtcggaacgcatcaacggtttaatctggcgtaacacctgaccgaatacatggctcggcaccacgacaaggatgtcgcggctggcggccagcgcggtggccaggtcgctctcaagatgcagcgtatccgggaaaggcacatcgggaaggaacgcggcgttgcagcgatcgtgttgcagcgtcgcgatatgtttcgggtcatggccccacagcacaacgtggtggccatttcttgccagggtgatggcaagagcggtgccgtaagagccggcaccgatcacagtcattgcagcattaagtgcgttcatcaggcatcctgatgttgttcagcaccttcgccagcctgctgctgcagatagttcatgaacagcgcgtcgaagttcactggcgcaaggttaagttgcgggaaggttccgcgggaaaccaggctggtgatgcactcgcgcgcgtacgggaacagaatgttcgggcagtatgcgccgaggcagtgcgccatctgggtgccttcgatgccgtcgatggagaaaataccgccctgctgtacttcacagaggaacgcggtttcttcgcccagcgcagcggtcacggtcacacgcagcaccacttcataaacgccttcagccagctgggtggaggcggtatccagatcaagtttaacttccggctgccagtctttctggaaaacttgcggcgcgttcggcgcttcaaaagagatatctttggtatagatacgctggatctggaaggtcatttcggtgctgttttgttctgacatagtaaaaccctttcgtgttgtccttaaatacgcgcttccgccagggaaagcgcgcaaaaattagcgcaagaggggatcaagtccaccacgtgaatcaagcgcatacaagtcgtcacagccgccaatgtgctgcgcatcaataaaaatctgcggaaccgtcgtccgtccgctgcgctggatcatctcctcacgcttcgcggcatcgccatcgatcggcaactcatggaacgttacgcctttgctgttcagcagcgctttcgcgcggatgcagaacgggcaggtcgctttggtgtagatctcaatattggccatgacttcactcctgttgttaccctgagggttttacgccgcagcctgtgttcccttcacgtcaggcgtgaaggagaaaacgcggcggcatcaccacgcgaggtaagttatttgccgcgtaccagagggaggttttcgccgctccagccagcaatgccctctttcagtacaaagactttttcaaacccggctttgttcagcgcgctggcgggctcttgcgcctgcatgccggaaccgtctaccacaataatgggttgcgatttgtgtttttccaactcgccgacgttattggctttgatatcgctgggcagcaggttaatagcgccggcaatatggcctttacggaaatcgtcacgctgacgcaggtcgaccaccaccgcatcttctttattgataagacgcgtcgcttcaccacgggtgatgactttaactttcgacatcagccccttgaaggtggtgaacactaccgcacccagcagcgcgatccacgcgatgctcaggaccgggtgacggccgatgaattgcataatttcttgcatggggggttacaactcccgactaagtgagaaaaaaaccaggaaaggagtatacctgtgccttgcggcaattacagccagtgagcgcgatgtaatgtattttctgcgggcggtggcgaaaaaaagccgctctcgctgacccggcgcggcccggccgctccctttctttgatctttcacggggatttaaacgattcagctgtagtaaaattacgcaaaatttctgtctttgagcatgaggttgtcgcaatgtcggtttctaaaaaacctatggtactggtgattctggatggctacggctatcgcgaagaccaacaggataacgccatttatagcgctaaaacgccggtaatggacgcgctgtgggccaaacgtccacataccctgatcgatgcatccggcctcgaagtcggcctgccggaccgtcagatggggaactccgaagtaggccacgtcaacctgggcgccggtcgtatcgtctatcaggacctgacccgtctcgatgtggaaattaaagaacgcaccttcttcgccaacccggtactgaccgccgcggtcgataaagcggttgccgccggcaaagcagtacatatcatgggcctgatgtcgccaggcggcgtccacagccacgaagatcacatcatggcgatggtggagctggcggcagagcgcggcgctgagaagatctacctgcacgccttcctcgacggccgtgatacgccgccgcgcagtgcggaaaaaacgctggcgacattcgaagccaaatttgccgcgctgggcaaaggtcgcatcgcatcgctcatcggccgctattacgccatggaccgcgacaaccgctgggatcgcgtagaacaagcttatgatctgctgaccctggccaaaggcgaattccaggccgataccgccgtcgcaggtctgcaggccgcctacgcccgtgacgaaaacgacgaattcgtgaaagccaccgttatccgcgccgccggccaggccgatgccgcgatggaagacggcgacgcgctgatcttcatgaacttccgtgccgaccgcgcgcgtgaaatcacccgcgccttcgtcaacgccgacttcgacggctttgcgcgtaagaaagtggttaatctcgatttcgtgatgctcaccgaatacgccgccgacatcaaagtcgcctgcgcctatccgcccgcctcgctggccaataccttcggcgagtggatggcgaagcacgataaaacccagctgcgcatctccgaaactgaaaaatacgctcacgtcaccttcttcttcaacggcggcgtagaagagccgtttaaaggcgaagagcggatcctgattaactcgccgaaagtggcgacctacgatctgcagccggaaatgagctccgccgagctgaccgagaaactggtcgccgccatcaaaggcggaaaatacgataccatcatctgtaactacccgaacggcgatatggttggccataccggggtgatggaagcagccgtaaaagcggttgaagcgctggatcgctgcatcgaccaggtggctcaggcggtggaatccgttggcggccagctgctgatcaccgccgaccacggcaacgccgagcagatgcgcgacccggccaccggccaggcgcacaccgcccataccaatctgccggttccgctgatctacgtcggtaataaagcggtcaaagcggtcaacggcggcaaactttccgacatcgccccgaccatgctgtcgctgatgggaatggaaatcccgcaagagatgactggcaagccgctgttcatcgtggaataatccttccccatgaggggaaaggcgatgtattcaactacatggatcgcagcggcagttcgatccgtcctttacgccagcgcgctcagcgctggcgtattgctgtgcgcgtcatctgcgcatgccgacgatcgcgatcagctaaagtccatccaggccgacatcgccgccaggcagcgggcgattaagcaacagcagcagcagcgcgcaagcctgctcgcccagctcaaagcgcaggaagaggcgatcgccgccgcggcccgcaaactgcgcgaaacccaggatagcctgaaccagctcaataagcagattgacgagatgaacgccgctctcgcgaagctggagcgccagcgcgcgtctcaggagcggaacctcgccgcgcagctcgatgccgctttccgccaggggccgcataccggcatccagatggtgctcagcggtgaagagggccagcgcaatcagcggatgcaggtctatttcagctatttcaaccaggcccgccaggagactatcgcggagttgaagaaaacgcgcgaagagatggcggtgcaaaagtcgatgctcgaagaaaaacagagccagcagcaaacgctggtctacgagcaaaaggcccagcaggcgaagctggagcaggcgcgtaacgaacggaaaaagaccctttccggcctggagtcttccattcagcagggtcagcaacaattaagtgaattacgggctaacgaatcgcgcctacgcggtcgtatcgcccaggcggaggctgccgccaaagcccgcgccgatcgggaagcacgcgacgcgcaggcggtgcgcgaccgccagcaggaagcatcgcgcaaaggcactacctataaaccaacggaaagtgagcgttcgctgatgtcacgcaccggcgggctgggctcgccgcgcggtcaggcgttctggccggttcgcggtccgctccttcatcgatatggcgaacagctgcaaggtgaactacgttggaaagggatggttatcgccgcgtctgaaggcaccgaagtcagagccattgccgatggtcgggtcattctggccgactggctgcagggctatggtctggtggtggtggtcgaacatggcaaaggcgacatgagcctgtatggctataaccaaagcgcgctggtcagcgttggtacccaggtgcgtgccggccagcctatcgcgctcgtaggcagcagcggcggtcagggccgtccgtcgctctatttcgaaattcgccgccagggtcaggcggtcaatccacagccgtggttgggaagataagttttgcttcaatttcgcgcaattgctcttgccgtagccggttcgctggctctggcggcgccagcgttcgctggcaaactctccatcgttattgacgattttggctaccgcccgcagaccgaaaatcaggtgctggcgctgccgtccactatctccgtcgccgtgctgccgaacgcgccgcacgcccgggaaatggccacgaaagcgcataatctgggccatgaagtgctcatccacctgccgatggcgccgctcagcaaacagccgctggaaaaagacaccctgcgtcccgaaatgagcagcgaggagatcgagcgcattattcgcgaggcttacggcaaagtcccttacgccgtcgggctgaataaccatatgggcagcgcgatgacctccaacctgtttggcatgcagaaggtgatgcaggccctggagcgctacaatctctattttctcgacagcgtcaccatcggcaacacccaggccatgcgcgccgcgcagggtaccggcgtgaaggtgattaagcgcaaggtgtttctcgacgatacgcagaatgaagccgatatccgcaaccagttcaatcgcgccatcgccctggcgcggcgcaacggttcggcgatagccattggccatccgcatccgacgacggtgcgggtgctgcagcagatggtctataacctgccgccggatatcacgctggtgcgcccgagcagcctgctgaacgagccgcaggtcgacaactcgacgccaaactacgcccagccgcccgcgcaacaaacgcagcagaagccgcgtaatccgttccatggcgtgaagtcttgcaaaccgaagcgcccgctggagcctgtgaacgccagccgcttcttcactatcctcagcgatagcatcagccagagcgcgctgatccagtactatcgcctcaaatggcagggctgggacaatcccggcaactagaccactcaggggtccgttcgcttttgcgcgacgggcgcctggttatcttcgtgggcgtaccacgccttaaaatatttcagaaagctgtaaaacgtcgcgtacaggccggtcaccacgccgaccttgccatagcgccacgctccgctaaacagataccacttaaagaaagcgccaatggcgctgacgatcccccgcgtcagcgaaggtttgatctgctggtacttcaccagccgggtggtatagctgttcagcttattaaacacttcatgcagcgaataaaaggtatcgtggcgaacaaagcccggcagcctgacggagctcgcgtgtccgaccacctggtcatccaccggccgatcgttaaaccgcgcctgctggcggttaaagagccgcaccggataatccggtgaggaaatggggtagatcgtccgtacctgtttgcctagcacaaaccagtagcgcggcagacgccaggcgcaggtcggctcaggctcctcccccgcttttagcgcctgaatggccgccaccacgtcattatcaagaatttcgtcgctgtccatgcacagcacccagtcatggctggccagtccgatggcatagttcatctgcgcgccgtgggctttataggcatggtgatggacggtgagaccaaactgctggcaaatagcgacggtttcgtcggtactgccggagtcgacgacgatacattcatcggcaaccttcagcagaggcggcagcacctccatcagcaggcgcgcagagttacaggtcagtaagcatacggagagtttaagcatgatagttacaaagttaaactgcgactaaacacactgtataagcgaataaccgtaaaatcgatgtagaaattgtgcgcttaatattaagcaggctaaaaatgttatccaaatctaaattaaggcgcccgcaggcgccttttttgctgatttttacgccagcatgggggattagtcccagctcaaaaccactttaccggactggccggagcgcatcgcgtcaaaacctttctggaagtcatcaatgccgaagcggtgggtgatgatcggtgagagatccagaccagactggatcagcgccgccatcttgtaccaggtttcgaacatttcgcgaccatagatacctttgataaacagccctttgaagatgaccttggtccagtcgatggacatatccgacggcgggatacccagcatcgcgatacggccgccgtggttcatggtatcaagcatgctgcgaaacgccggcggcgcgccggacatctccagacccacatcgaaaccttcggtcatccccagctcggccatcacgtcattaaggttctctttggccacgttcaccgcgcgggtaacgcccattttgcgcgccagctcaagacggtactcgttgacgtcggtgatcaccacgttacgcgcgccgacgtgtttcgctaccgccgccgccatcacgccgatcggaccggcgccggaaaccagcacgtcttccccgaccagatcgaaggagagcgcggtgtgcaccgcgttgccgaacgggtcgaagatagacgccaggtcatcagagatattgtcggggattttaaaggcgttaaaggccgggatcaccagatactcagcaaagcagcccgggcggttgacgcccacgccgatggtgttgcggcacagatgggtgcggcccgcgcggcagttacggcagtggccgcaggtgatatgcccttcgccggagacgcggtcgccaatcttaaagccgcgcacttcctgaccaatccccaccacttcgccgacatattcgtgaccgaccaccatcggcaccggaatggtcttctgcgaccactcatcccagttgtagatgtgcacgtcggtcccgcaaatggcggtcttgcggattttaatcagcagatcgttatggccgacttccggttccggtacgtcggtcatccagatgccttcttccgctttcagtttggataacgctttcatctcatacccttattaggcgatgacgcccagttgtttgccgatgcgggtaaaggcttccaccgcacgctcaatttgttcaggagtatgcgccgccgacatctgggtgcgaatacgcgcctggcctttcggtaccaccggatagaagaagccggtgacatagatcccttctttctgcagctcgcgggcaaagttctgcgccaccaccgcctcgcccagcatcaccggaatgatggcgtggtcggcgccggccagcgtgaagcctgccgcggtcattttttcgcggaacagacgcgcgttagcccacaggcgatcgcgcaggtctgccccctcttcaaccatctccagcactttgatggaggcggccacgatggccggcgccagagagttggagaacagatacggacgggagcgctggcgcagccactcaaccacctctttgcgcgcggcggtgtagccgccggaggcgccgcccagcgctttacccaacgtgccggtgatgatatcgacgcgccccatcacatcgcagtattcgtgggagccgcggccgttttcgccgacgaagccgacggcgtgggagtcatcgaccatcaccagcgcatcgtatttatccgccaggtcgcaaacgccttgcaggttggcgatcacgccatccatcgagaacacgccgtcggtggcgatcagcacgtgacgcgcgccggcctcgcgagcttctttcagacgcgcctccagctcttgcatatcgttgttggcatagcggaagcgcttcgctttacacagacgcacgccgtcgatgatcgaggcatggttcagggcgtcggagataatggcgtcttccgggccgagcagcgtttcaaacaggccgccgttggcgtcgaaacaggaggagtagaggatcgcgtcttccataccgaggaaatcggccagcttcttctccagctgcttatgcgtatcctgggtgccgcagatgaagcgtaccgaggccatcccgaaaccgtggctgtccatgccggatttcgccgcggcaatcagttccgggtggttcgccagacccagatagttattggcgcagaagttaatcacgtggctgtcgccgacggtaatgtccgcctgctgcgccgaggtgatgatgcgctcttctttgaacaacccttcggcccgagcggtctccagattgctagttaactgtttgtagaaatcaccacgcattgcaactctccagattcggcaaaatttggcacatattacccaaagctatacgctgatacgagatgatgcaggcctgaatgaattatttgcagcataaatcacgtcagcccagcaccttattctgcgaatggctgtaggcttgctcatgtggtgatatgataagagcattcatgtccggattgtctccgggctctcaacttcaaaggtacagttatgatcatcgttaccggcggcgcaggctttatcggcagcaacatcgttaaagcgctgaatgacaaaggcatcaccgacattctggttgtcgacaatctgaaagacggcaccaagtttgtaaacctggttgacctgaacatcgctgactacatggataaagaagactttctgatccagattatggcgggtgaagagttcggtgaaatcgaagcaatcttccacgaaggcgcgtgctcttccactaccgagtgggatggtaagtacatgatggacaacaactatcagtactccaaagagctgctgcactactgcctggagcgcgaaatcccgttcctgtacgcctcctccgcggccacctatggcggacgcaccagcgacttcatcgagtcccgcgagtacgaacagccgctgaacgtttacggctactccaaattcctgttcgacgaatacgtccgccagatcctgccggaagccaattcgcagatcgtcggcttccgctacttcaacgtctacgggccgcgcgaaggccacaaaggcagcatggcgagcgtcgctttccacctcaatacccagctgaataatggcgaaagcccgaaactgttcgaaggcagcgacggcttcaagcgcgacttcgtctacgtgggcgacgtggctgacgtcaacctgtggttctgggaaaacggcgtttccggcatctttaacctcggcaccggccgtgcggaatccttccaggccgtcgccgatgcgaccctggcataccacaaaaaaggcagcatcgagtacatcccgttcccggacaaactgaaaggccgctaccaggcgttcactcaggcggatctgactaacctgcgcaaagcgggctatgacaaaccgttcaaaaccgttgccgaaggcgtaacggaatatatggcctggctaaaccgcgacgcgtaagaaacaagcatgaaaatattggtggtaggcccgtcttgggtgggcgacatgatgatgtcgcaaagtctttatcgtacgctcagggcgcgctatccccaggcgattatcgacgtgatggcgccagcctggtgccgtccgttgctttcgcgcatgccggaagtgaacgaagcgatcccgatgccgctgggtcacggcgcgctggctatcggcgaacgccgtaagctcggccacagcctgcgcgaacgtcgctacgatcgcgcttacgtgctgccgaactcgtttaaatcggcattagtccctttctttgccaatatcccgctgcgcaccggctggcgcggcgagatgcgctacggcctgctcaacgacgcccgggtgctggacaaagacgcctggccgctgatggtggaacgctacgtggcgctggcctacgacaacggcgtgatgcgctgcgccaaagatctgccgcagccgctgctgtggccgcagctgcaggtcaacgaaggggaaaagtcgcaggcctgcagcgcctttaacctgtccaacgatcggccgatcgtcggcttctgccccggcgcggagttcggcccggccaaacgctggccgcactatcactatgctgcgctggcgaaaaagcttatcgacgatggctatcagattgcgcttttcggctcggcgaaagataacgaggccggcaaagagatcatcgccgccctcagcagcgagcagcaggcctggtgccgtaatctggcgggtgaaacccagctggagcaggcggtcattctgatcgccgcctgtaaagctgtagtgactaacgattcggggctgatgcacgtcgccgcagcgctggaccgcccgctggtggcgctgtatggcccgagcagtccggactttaccccgccgctgtcgcataaagcgcgggttatccgtctgattaccggctaccacaaggtgcgcaaaggcgatgccgccgaaggctatcatcagagcctgatcgacatcaccccagaacgcgtcctgcaagagctgaacgaactattagcggaaaaaaccgagcacgaggaagcgtaacggatgcgggtattgatcgttaaaacctcctccatgggcgacgtgctgcacacgctgcccgcgctaaccgacgccgcgcaggctatccccggcatccgcttcgactgggtggttgaagagggtttcgcgcagatcccctcctggcatgaaagcgtcgagcgggtgatcccggtggcgatccgccgctggcgcaaagcctggttctccgcgccgatcaaagccgagcgtcaagcctttcgcgaggccgttcaggcggtaaagtatgacgccatcatcgatgcccaagggctggtaaaaagcgccgcgctggttactcgcctggcgcacggcgtcaagcacggtatggactggcaaacggcccgcgagccgctggcgagcctgttttacaaccgccgccaccatatcgcgaaacagcagcacgcggtggagcgtacccgtgagctgttcgccaaaagccttggctacgcgaaaccccagacccagggggattacgccattgcgcgccatttcctgcagcacgaggctagcgctgccgcgccctatctggtgtttctgcacgccaccacccgcgacgataagcactggccggaaacccgctggcaggagcttctcgatctgctggccgacagcggcgtccacattaagctgccgtggggggccccgcacgaagaggcgcgggcgaagcggctggcggaaggccgggagtatgttgaagtgctgccgcgcatgagccttgagcaggtggcgcaggttctggccggcgcccgggccgtcgtctcggtcgataccgggctgagccatctgaccgccgcgctggataaaccgaactttacgctctacggcccgaccgacccggggctgattggcggatacggtaaaaaccagcatatcgtgcggccggaaaacagcgccagcaccggcgatattgcggccagccggattcatcttctcctgcaaaatcaggggctgctctgatgggatccctgtttaagcagatctaccgctatacgcgccctcgcgcgtatcgccacaatgaaaatctgtggccttttacccgtattacgcgcgcgccaagcggcgaaatcagcgcgttacgctataaagggaaaacggtgccgctggtcagcctgagcgcgctgaaaaacagtatgcagggcgaagtcctgctgaccgccaccggcccctcaacccgcaatatcgatttttccctgttgtcgaaaacgatcccggtgatgggcgtcaatggcgcctggcatcttgccgaccggctgcacttttcgctctataccatcgtcgacatggaatttttcgataagaagccggacattatccgcgccattgtcagccagccggatattttgctgttcaccaccatgcacgggatcgccaaaatcgtcgatcgctatggggacgcgctgcgctgccgtttggcgttgattgaggacggttgctataagatttaccagccgaaagtcgccagcgaagcgataaagcgcacttaccagcagaatgcggcgatgtgctttcatcctcagcgcccggatatctgttttagcaccgatattcgccagggcatctttgatgccggcacggtggtctactgggcgctgcaaattctcgcctggctgggcttcaatactatcctggtgagcggcctggatatgaccaactttaaccagccgcgattctacgaaacacaacaagaaaaattgccttcttacctggcaacaaaagtggataccctcgtcatgccctcctttgcgcatgccgcgcaggtactgcagcaacgccagattcgggtgattaatttttccccagaaagcgctgtgccggatactatcttcgaaaaggttgcgtttaatgagtactttaaaagtgagtaacttcgccagacagggttactcgattgtctttcctttgtttctatttttcagcgcgattttttgcatgtccacccggaccaataatctgctgcatttatcgatcctgctgctattgctgtcgctggtacgccaggaaaaccgccaggcgctggccggggtgttacgcgagcagtggcagacctggacgctgctggcggctttctttatctattacgccctcagtaatgtgtggggccatacgccgcagcatattgactcgccgatcacccacggcgtgtatctgaccgggtatctgttgctgatgacgatgctgctcagggacggacgaacccgccgactggcgatgctggcggtggtcggcgggatcaccgtgctctccctgtggacgctgattatcgaccatacgctggttctcaccgaacgagcggtctcccccgagaaccccggaccaacgaacgttatcgaccttgccggttactgcggcatcggcattttaatttgcggcatgctactgaaagaaaaagccagccactggctctatctgccggtggtcatcatgctggtgatgctgctgctcacccaaagccgcgggccgatcatcgccctggtgctggcggtcggctgtacgctgcacctgcacgtcttcacccgccgcaacctgctgatcgccgcggcgctggccgtgctggtagcgctgcttttggtcatgacgccggtgggcgacatgctgctcgcccgtttcgaggagctgggcacccaaagcgggctgcgcctgagcatctggcaccatacgctgtcggagatggccagccagccgtggctggggcgcggtttcagctatgaactggatttcatcaactacagcggcgagcacatcaccaccacccacagtgtgtatatgggcgccctgctgaaaggcggcatcgtggggttactgctgctgttggcgatcattgcctgcgggctatggcaggcgtggcgcaagcgccataccgacagccgctacagtctggcgatcctgttttacgcgctggtgtttatggcctcgcaggggatgtttatcatcagcaatccccgggaaacctgggtgctgttctggctgccgctgggcattgcgctcagcaaagggttggcggaaaaacgctaacaaaaagggccgtcagcggccctttttatattaactttttaaatcaactgcgggcggcgaccagccggtcggcctgctctttaatcacgggccacaccgactcaatcgccacatcggcgacattcgcttcttcacagactatctgcttcgccttgtcatagcccggcgcccagatgtgatagccgggcagcccggtattcttgagtttgcgtttgttatagaccgccaccatcggcttatcgaaagcccgggcaatatgcacgatcgaggtgtccggcgtaatgactaaatcacagctgcggatcacttctacggcggagttgatggtgctgtcggcgatgtacagcgccatatccagccccagctggcggattttttcactgcgccccaccatcacgatacagacccggtaaggcagagcatgtagccgctcgaccagggtcgccacctggtgacgacagaagtctttatcctcggaggcggtaaaagggttaatggcgatacgcagttcgacctctccggcctgagaaagcaagcgggccactttctcccgctcatggcggcagccggggagatgatagtgatacgggcggtcgtcaacgatgccaaacagcttcaccacctgcttatagcgcagggaaatatggctgttgccgtcaaaaaaagcaattgagtgatcgtaaagtttatagggctctttattaaaaccaatcacgctggtcgcccgtaaatcggcgagtaatttaaagcgttcatagctggtcacgtcatcaaaatcgataaccgcatcaaaacccgccgcccgcaacgtatttaaggacatgcggggccgatataaatatacttgctgaatgaattctgagcctgctaatatttcgctgcatattggtccggttaacaccgaaacctgatatccccgttcggccagtattctggcgcagccggtcgtgaccaccatatcaccgactttatcatccagacgcaatagcagcacgcggcgcacagccgctgggtcgaaggctttacgcgccggcttatttctgtatcgatagttaattaaattaaatttaatgccgcggaaaaaggcattctttttccgcgttaattgtttaaggatacgcatacggtaccttgagctgtgttagcgctgtgtaattttccgctggtaatattctgccaacgtcatgcccttcacctgcggcgccagccagctaaaaaaggcttcgaggtcagcgtataaacgctcaatatcccgttcattctggaacgtggggctgccgccgggcatatactctgaagagtggagcatatattccacgtagtcattgccctgcgtcaacgtttgttcgacgacttttttcatcgtctccacattgccgcccatcggtcgcagccagtgtacggagggggagcgcactttgccgcgcaggcggtcgtaaccctgcttcacgctgttcatccacgctgagtgcttgtactggatgctcatcggcacttccagcagcggcgagtggccctcgcggctgatgtcattttcatcgaggaaataggcatgctgcggaaagcggcgataatcggtcccgccatcgccctgcggcgcccccttggcggtcttccagttcacccgcggggtcaccgagcaatccacctgatacccgtactccaccagcagacgcgcatagcgctcgtcaaaagcccagcgcccggcgcgatggctaaccattttggtctggaaggtatcctccagcagacgcgtcatatagtcgaccttctcacgcatcatagcgtcgctgtattcaataagataaggcttatggcgccagtcatctgcagtcagcggctcggtcggcgggctgttccacgcatgcagatgcatgccgacttccgcggtgccgcgggcaatcacgtctctggcgaattcgatataaaaggggtcgatggccatttcatagttggtcaaatagaccggtttaaagccatacttttcgcaaagctgctgaaaacgcggaagataacgcgcattctcggtggtgatgctgtcatgtttttgccagaggttatcgccctctgtatcaatcgtgatgagaaatgcgggattgtgcacgaaaacgtcctcaggccatacgtatcgggtcatggtagagcaatacaacgcttctctcaatctgtctgatcccctagaatcggaacccttatcctggatgaagaacagagtatgacgcctgaaaccctctcccgcggcccgttgaacccggcgcggatcctggtcattaagctgcgccatcatggcgacatgctgctgatcacgccgcttattcacgcgctgaaacagcagtaccccgccgccagcgtggatgtcctgttgtatgaagagacccgggatatgctcgcagccaaccccgatatccaccatatttatggtctcgatcgccgctggaaaaagcagggaaaaaggtatcagctgaagatgcaatggcagctcattcagacgctgcgccagcagcggtacgatatggtgcttaacctggccgaccagtggccgagcgcggttatcagcaaactgaccggcgccgcgacgcggattggttttgattttccgaagcgccgccacccggtctggcgctattgccacaccgcgctggcctccacccaacagcacaaccagctgcatacggtacagcagaatctctctattctcgctccgctcggtctccagttgaacgatgcgccggcgcggatgggctacagcgaagcagactgggccgccagccgcgccctgctgccggaggacttccgggaacactacatcgtcatccagccgacgtcgcgctggttctttaaatgctggcgtgaagatcggatgagcgccctgatcaacgcgctgtccgccgaaggatacgcggtggtgctcacctccggccccgatgctagagagaagaagatggtggataccatcatcgccggctgcccgcaggcgcgactacactctttagccggccagttaacgctgcgccagctggcggcggtgatcgatcatgcccggttgtttatcggcgtcgactcggtgccgatgcatatggctgcagcccttggcactccgctggtcgccctgttcggtccctcgaagctgaccttctggcgtccgtggcaggcgaaaggcgaggtgatctgggccggcgacttcggtccgctgcccgatccggacgctatcaacaccaacaccgacgaacgttatcttgatttaattcctaccgacgccgtgatcgcggcggcgaaaaaggtactggcatgagtaaattcaggctggctctggtgcggcagaagtaccgcccggacggcggcgcagaacggtttgtctcccgcgcgctggaagccctcgacagcagtcatctgcaactgaacgtcatcacccgcgaatggcaggggccggtgaaaccggactggcagatccatatctgtaacccccgcaaatgggggcgcatcagccgcgagcgcggctttgccaacgccgcgcgcgcgctctggcagcgcgagtccttcgacctggtgcagagccatgaacgtattcccggctgcgatctctaccgcgctggcgatggcgttcatcgccgctggctgcagcagcgctcgcgcattttaccggcctggaaaagccgcctgctgttcgccgaccgttaccaccgctacgtcatgcaggcggaacgcgagatgtatgaagactcacacctgcgcggggtgatctgcaacgccgagatgatcaagcgcgagattatcgaagactttggcctgccggcggagaagatccacgttatttacaacgccattgacaaccagcgcttcctgccgccagacgaagagacctttgccgccttacgcgccaaatggcagctgccgctgcaggcgacctgcctgatctacgtcggctccggctttgaacgtaaagggctggcggcggcgatccgcgccatcgctcccaccgatcgctacctgctggtggtcggcaaagataaggatcagccgcgctatcaggcgctggcgaagagcctgaactgtgaagcgcgggtgcgcttcttcggcatgcagtcggagacattgcccttctatcaaatggccgatggtctgctgctgcccaccctctacgatccgttccccaacgtcatcctcgaggcaatggcctgcggtctgccggtgatcaccactaccggctgcggcggggcggagtttatcgtcgacggccacaatggttacgtctgcgacgctctggatatcccggcgctacagcaggcggtaatggccctgcccgcgcgcgcgctgggctccgcggaaggcggtcacgcccgcgagcgcattatggcctgcaccagcgagcgactctcaacccagctgctttctctttatcaggatctggtgaaataacgatgcgcatcttatttgtgattgacggcttacccggcggcggcgcggaaaaagtggttctgaccctggcggcacagttcctgcgcgacggcgatcgggtgtcgctcatttcgctgcgcgatgtctgcgagtacccattgcccgaggggctcgactaccaggtagttgccgatcgctgccgtaaaccgtggcgcaagctgaccgagctgtcccgccgcgcccgccagctggacgccgcagtcgtgcgggccgaacagcaggggcaatttgaccttgtgctctccaacctgcacaaaaccgaccgcatcgtcgcccgcagccgggcgctgcgcgagcgtaacgtctggttctgtctgcacggcgtattctctgcctcctatctcgggcaccgcaccggctttgaccgctggatgaagcagcagaaaattaagcgaatttatcagggtcgcaacgtggtgacggtttccgacgcggtggggcgagatctggtggaagagtttgccctgcgcccggcacagctgaaaaccatctacaatcccttcgatatcactgccctgcgcgccgaggcggaagccgatagcgagcgcccggacggtgactacctgattcacgtcggtcgcttccatccgggcaaacgccatgaccgcctgcttgaagcctatgcgcagagcggcatcgacgcaccgctggtgctgctaggccagggaaaaccggagcaagagcagcgcctgcgccagctggcaaaaacgctgcacattgacgatcgggtgtggttcaaaggctttcagaaaaaccccttaccgtggataaaaggcgcacggatgctggttttgagctccgatagcgaaggattcggcaatgtggtggtggaggcgctactgttacatactccggtcgccagcacccgctgccccggcggcgtcaccgagatcctcaccggcgaacttgcccgcggtctggcggatctgaccagtccggcgctggctcagacgatgcaaagcatttaccataacccgccggccatcgacgatgccgcgctggaaaaattcagcgtcgtatccatttgtcagcagtaccgtcagctgcagcgcacctgacgccgttagttaaccaggatcgaagatttatgagtcaaacgcctttattgagcatcgtggctgccgtctacaacggtgagaaatttctagcgcaattctttgagtgcattgaacagcagcagctggacagctatgaactgatcctggtgaacgatggttcgacagacaacagcctggcggtgatcgccgaatggcaggagcggctgcagaacgtccaggtgctggagcaggaaaaccagggcgtctcggtcgcgcgcaataccggcctcgccgccgccagcggcaaatatctcgcgtttccggatatcgacgacaaactctatccgggcatgtatcgcacgctgctggagatggccgagaaagaacatctcgatatcgctacctgcaacggcacctatgtgtacgaaaagcgccgcgagagccacccgatcttcccactggatcgcctgccctcgacggatgtgctgccgggccatgtctggcttaagcaggccctggactcgcggaagtttctgcacgtcacctggcttaatatttatcgtcacgactttatccgccagcatcacttccatttcgagcctggcctgcgccatcaggatatcccatggaccacagaagccctgctggccgcggagcgcgtgcagtacaccagtcagcagttctatgattactacattcactctgagtcggtgtcgcataagccggacaacgacgacacgctgatgcgttcggcgcgccactatatgaaaattctggagatgctggaggcgattaaccagcgctacccggataaagtacgccatatcgccgcctgtcgctggcagatcgccaaagaaggcctggggatcatccataccttcgatagcatgaaagatgagtccaaaaagcatgttattattaacgaattcttcgaccgcggtatctggcggttaatctggaaaaacgcctgtactttccgtttacgctggcgcctgggacgccgttatctgcgtattaagcgttatcgccacgcgggatagaccaaaaacccgctgtttccgccaaagagatagctttacgcgggctaaatgcttagaatttgcccgccaaaacagagaacggataaatagtttggaattgctttataccaccctactttaccttattcagccgctggtgtggctgcggctgctgctgcgcagtcgtaaggctcctgcctatcgcaaacgctgggcggaacgctatggcttctgtcagaacaaggtagagccggatggcattctgctgcactccgtttccgtcggcgagaccttagccgccattccgctggtccgcgccctgcgccatcgctacccttctctgccgatcaccgtcaccaccatgacgccgaccggctccgagcgcgccatgtcggcgtttggcaaagatgttcatcacgtctatctgccctacgatctgcccggtgccatgaaccgcttcctgaacaccgttcagccgaagctggtgatcgttatggagaccgagctgtggccgaatatggtggccgcgctgcataagcgtaagatcccgctggtgatcgccaacgcgcgcctgtccgaacgttccgccaaaggctatgccaaactgggcggctttatgcgccgcctgttgagccgcattacgcttatcgccgcgcagaatgaagaagatggtaaccgcttcctctccctggggctgaagcgcaaccagctggcggtcaccggcagcctgaaattcgatatctccgtcacgccagagctggcggcccgggcggtgacgctgcgtcggcaatgggcaccacaccgcaaggtctggattgccaccagcacccacgacggtgaagaacaaatcatcctccaggcgcataaaaaactgctggagactttcccgaacctgctgctgatccttgttccccgccatccggagcgcttccctgacgcccgtgagatggtacaaaaggctgggatgagctttactctgcgcagcacgggcgagatcccctcctccagtacccaggtagtcattggcgataccatgggcgagctgatgctgctctacggcattgccgacctcgccttcgtcggcggcagcctggtggagcgcggcggccataacccgctagagccggcggcgcacgccattccggtgctgatgggtccgcataccttcaacttcaaagatatctgcgccaagctgcagcaggacgatggcctgatcaccgttaccgatgccgattcgctggtcagggaggtgtccacgctcctgaccgatgaagattaccgtctgtggtatggccgtcacgcggtggaagtgctgcatcagaaccagggcgcgctgtcgcgtctgctacagttactgcaaccttacctgccgcagcggagtcattaatgtcgaaccggctttccgtggtgatgatcgctaaaaacgccgccgacctgctgccggattgtctgggctccgttagctgggcggatgaaattatcgtcctcgactccggcagcaccgacaacaccgttgagctggcccgccgcctcggcgcccaggtctatacccataccgactggcgaggctatggcattcagcgccagcgcgcgcaggattacgccaccggcgactgggtgttgatgatcgataccgatgagcgcgtcacgccagaactcaggcaggctattcttaaggtactggacgccccccagcgcggcgccatctacagcatcgcccgccgtaactattttctcggacgctttatgcgccacagcggttggtatcccgatcgcgtcctgcgcctgtacgaacgcgcccgttaccgctataacgataatctggtccatgaatcgctggatagcctgggcgccgaggttattccgctgaccggcgatctcctgcacctgacctgccgcgacttcgctggcttccagcaaaaacagctggcgtatgccgccgcgtgggcgcttgagcgtcaccagaagggcaagaagacctcgatggcagggattttcagccatacgctgggcgcgttcctcaagacgttgctattgcgcggtggggtgctggacggtaaacagggatggttactggcgatggtcaacgcgcagtatacgtttacgaaatataccgagctgtgggcgctgagccacggctactcggagaaagagtcatcatgagcacaaaagcgatctatccgggtaccttcgaccccatcaccaacggtcatatcgatattgtcacccgcgcggcaagtatgttcgataaagtggtgctggctatcgccgccagcccgagtaaaaagccgatgttcagccttgatgagcgcattgcgctggcagagcaggcgacggcccacctggtgaacgtggaggttatcggcttcagtgatttgatggccaatttcgcgcgcgcgcagcaggccaatatcctgatccgcggcctgcgggcggtggcggatttcgagtatgagatgcagctggcccatatgaaccgccacctgatgcccacccttgagagcgtgtttctgatgccgtgcaaagagtggtcgtttatctcttcctcactggtgaaggaagtggcgcgccaccagggcgacgtttctcactttctgccagctaatgtgcatcaggcgctgttgaataagctgaagtaacgcatctgccgggacatgagccaagtcggctggcgcagcactacgccgctgggccattcacaccggctctgtcccggtctttgtgccagatggcgctacgctgacctggcctacaaacgcccccggcccaccagatgcgcacccgcaggcccgctgacctggccgacaaacattcctgttcctgagactacttctggcactgacggcaataaaaggtcgcccgctgggcatgtttggtcccgacgaccggcatgccgcagatccggcagggttcgcccttgcggccatagacctgtagctcctgggcgaagtagcccggcttgccatcgctttgcaggaaatcctttaacgtggtgccgccctgctctatcgaacgcagcaggaccagcttaatcaccttcaccagctgctcacactcttcccgcgacagcgaggacgccagccggtcaggatggatcccggcggagaacagcgattcactggcgtagatattccccacgcccaccaccagcttgttatccatcagccagggtttgatcgcggttttcttcttcgcgcatttttgctggagatagtcggcgttgaacgcgtcgctgagcggctccgggccaagatgcgccagtaccggatggccttccagcgttctggtccacaaccaggcgccaaagcggcgtggatcggtgtagcgcaacaccttgccgttactcatgaccaggtcaacgtgatcgtgtttttcagcaggcagctcttcgctcaggatgcgcaggctccccgacatcccaagatggacgatgatccagccgtccggcagctccagaagcaggtatttggcgcggcgacgcacgctgagaaccggaacgtcgctcaggcgataaatctcttcggaaaccggccagcgcagccgtccgttgcgcacgacggcgtgcagaatggttgcgccaaccaggtgcggctcgatgccgcggcggctggtttcaacctctggtaattcaggcatgattttcctccgtttacccgacgtattgtgcttcacggacaggtgactgaaaagggagtatgtgaaagcaatatgggggagttttaaaaacaaaaaaccccgccgaagcggggtttttatacaaggaggctaaaattatttaattttagcttctttgtagataacgtgctgacgtacaaccggatcgtactttttcagttccattttttccggtttggtacgtttgttcttcgtggtggtgtagaagtgaccagtaccagcggaagaaaccagcttgattttctcacgaatacctttagccatgatttatttcctctaagtacttagtacttttcgccacgggcacgcagttcagccagaactgtatcgatgcctttcttatcgattacacgcatacctttagcagatacgcgcagggtgacaaaacgcttctcgctctcaacccagaaacggtgagagtgcaggttcggcaggaaacggcgtttagtcgcgttcagtgcgtgggaacggttgttaccggtcaccggacgcttgccagtaacttggcagactcgggacatgtctattctccaaaaatcaaattagctcgagcttcgtatggggtattggcgcctcgtcaggctttacagcctggtcatcgcagttcaatgtgaactctcgactgccaggcccaaatgccaaacccgagattctcaaaggtggcgtagtatacgctgactcggcgatgtgctcaagtcccgaacagacaaagatcccgaaggatcgccagttcggggctaaatccagccacgttcggcaaaagatacatacgcaccgcggccgataaccagatgatcaagcacgcgtatctccatgaatctacaacattttatcaccctttcggtaatcagtctgtcggcctgacttggctccgggctaccggagggatgattatgcgcaaggatcacggcggcggcgttcactttgatggcttcgcgtacaatttctcgcggatgcacctcaacgtggctaagagtaccagaaaaaagacgactatgtttcaacacccggttctgattatctaaaaagatcaccataaagatctcgcgctcctcttccgtcagctggctttgtaaaaactcgcgcgtcatcgagggggtgaccagcgcggcctcctcgaccagctgcgagctaaaatagcgtcgcgccagctcggcaatgcccttcagttgcgcatatttcgccagccccagtccgtccacagcaatcagttgcgctttatcagcggaaagcagagcgtagagtgagccaaaacgctgtagtaacgcctgggcatagctgagcacatcctgacgacgcgtgccgacgcgcagaaaaagcgccagcagctcaacatccgttagcgtttcgatgccgtattgcagcatcttctcccgtggcatcagattttccattccgtccatgcgccctcctggatgaatcagcctatcctggcacagcctgacggcgctgccgacccgccgattttcaccctgcgtagccgctcgcaaagtgaatgcccggcagaggcacgacggcggcaggattgtgataagatgcgcggattctggtctacggcaacaggaagacatcatgatgactctggcgggtaaaaaaatcgtcctgggcgtcagcggcggcatcgcggcgtataaaaccccggaactggtgcgccggctgcgtgaacgcggcgcggaagtgcgtgtcgcgatgacggaggcggcaaaagcgttcatcaccccactcagcctgcaggcggtatccggctatccggtttccgacagcctgctcgatccggcggcggaagcggcaatgggccatattgagctcggtaaatgggccgacctggtgatcctcgccccagcgaccgccgatttaatcgctcgcgtggcggccggcatggccaacgatctggtgtcgacgatctgtcttgccactccatccccggttgccgtggtgcccgccatgaaccagcagatgtatcgcgcgcaggccacccagcataatctgcagacgctcgctactcgcgggctgctgctatggggaccagacagcggtagccaggcctgcggcgacgtcggcccggggagaatgctcgatccgctaactatcgtagacatggccgcgcagcatttcgcctcccctgtcaaagatttgcaacatctcaacctcatgattaccgcgggcccgacccgtgagccattggatccggtgcgttatatcaccaaccacagctctggcaagatgggcttcgcgattgccgccgccgcagcgcagcggggcgcgaatgtgaccttgatcagcgggccggtatcgctaccgaccccgccgtttgtgcagcgcattgatgtcactaccgcgctggagatggaagcggccgtccaggctggcgcccagcagcagcacatttttattggctgcgccgcggtagcggattaccgcgccgccgtcatcgccgaagataaaataaaaaaacaaggtgatgaattaacaataaaaatggttaaaaacccggatatcgtggccggggtcgcggcgctaaaatcacatcgcccctacgtcgttgggtttgccgccgaaacgaataatgtggaagaatatgcgcggcaaaaacgtgcccgcaagaacctcgacctgatttgcgccaacgatgtttcccagcctaatcagggctttaacagcgacagcaacgcactacaccttttctggcaggatggggaaaagcgcttaccacttgagcgcaaggaactcctgggccaattattactcgacgagatcgtgacccgttatgatgaaaaaaatcgacgttaagattctggacccgcgtgtcggccagcaatttccgctgccgacctatgccacctccggctccgccggacttgacctgcgagcctgtctcgacgacgccgtagagctggcgccgggcgcaaccacgctgttgccgaccggccttgcgattcatatcgccgatccctctctggcggcggtgatcctgccgcgctccggcctgggtcataagcatggcgtagtcctgggcaacctggtgggccttatcgactccgattaccaggggcagctgatggtgtccgtctggaaccgcggtcagcagagctttattatcgagccgggcgaacgtatcgcacagatggtctttgtgccggtcgttcaggcggaatttaacctggtggaatccttcgatgccaccgaccgcggcgaaggcggcttcggtcactcagggcgtaaataagcccagcaacacggaatctgcatcccaacgcgcataacgcaataacattaccgcaagccctggtttgcggtcgcgttgtggatgtctgcctgacaagtgcttattttcaggggtattttaaaacatggcagaaaagcaaactgcgaaacggaatcgtcgcgaagaaatacttcaatctctggcgctgatgctggaatccagcgatggtagtcagcgtattaccaccgcgaaactggcggcttccgtcggcgtctctgaagccgcgctgtatcgccattttcccagcaaaacccgcatgtttgacagcctgatcgagttcattgaagacagtctgattacgcgcatcaatttgattttgaaagatgaaaaggacaccaccgcgcgcctgcgcctgatcgttctgttgattcttggctttggcgagcgtaatcctgggctgacgcgtatcctcaccgggcacgcgctgatgttcgaacaggaccggcttcagggtcgcatcaaccagctttttgagcgcatcgaagcgcagctacgccaggtgatgcgcgagaaaaaaatgcgcgaaggcgaaggctacaccctcgacgaaaccctgctggccagccagctgctggctttctgcgagggcatgctgtcgcgctttgtgcgcagcgagttcaaatatcgtccgacggatgatttcgacgcccgctggccgctggtcgccgcacagctgcagtaaatcctcacatgcagccgccaggctgcatgattctcctcgcaatctgcgtaagtttgtcgcaaatcccagggccattggttgaattgcccaatgcgcgtttccgctttcctttcctactatccagcttgctgaacatttcaccctcccccaacaccacccgacaaggagagatttgatggcgacgtcacggcgggatttactgaagataggcgggttggcaaccgcatcgctactggtcagtcaaaaaagcttcgcagcatgggccccctctgaacgctatccggacccacgcatcgtggccatcgatgatagctttcgtcgctatatgcttgccagcgcaaaggtcgaacgcatcgccagcggcttccgctgggcggaaggcccggtctggttcggcgacatgcgaatgctgctgtggagcgacattccgaataacgccatcatgcgctgggatgaagtcagcggagaaaccagcatctttcgctacccggccaattatagcaatggtcacgcccgcgacagacaggggcgcttaatcagttgcgagcacgacacccgccgcattacgcgtaccgaatacgatgggtctgttaccgtactggccgatagctaccagggtcatcgcctcaattctccaaacgatatcgttgtgaagtcagacggcaccatctggtttaccgatccgccatttggcatcagtggtttttacgaaggccacaaagcaacatcagaattgccgcaaaacgtctattgtctggagccggaaagccgcaaactgagcgtggtactgggcgacgtaaaagggccaaatggtttgtgtttctcgccggacgaaaagaccttatacgtggtggaaagccgggcgacaccgaaccgcttaattctggcgtgggatgtggaaggcaatacgctgaaaaataaacgggtatatctcgactgtgggaacggtaccgccgatgggatcgcctgcgacgcagacggcaatctgtggtgcggatggggaagcggaaacgaagaactcgacggcgtgcggatcttcaacccacagggtaagcatatcggcaccattaaactgccagagcgctgcgcgaacttgtgctttggcggcgaacagcgcaatcgtctgtttatggcgtccagcacgtcaatctattcgctgtacgtcaatgcgcagggcgctaagctgatatagcggaaatccggcagccgaggctgccgggcgcatcatcagacgccgtaggcttcacgataggcgcgaactgacgccaggtgttccgccatctccggcttttcttccaggtaagcgatcagctctttcagagtgatgattgagataacctggcagccgtaatcccgctccacttcctgaatggcggagatctcgccgcggccgcgttcctgacgatccagggagatcagaacgcccgccagcagcgcgccctgggcctggataatctccatggattcgcgaatcgccgtaccggcggtgatcacgtcatccaccagcattacccggccctgcagcgggctaccgaccagattgccgccttcgccatggttttttgcctctttgcggttaaagcagtaaggcagatcgcggtcatgatgctcggctaacgccaccgcggtggtggtggcgattgggattcctttgtaggccgggccaaacagcaggtcaaactcaattccggaatccaccagcgcctcggcataaaaacggcccagcagagccagatcgcgcccggtgttaaacaggccggcgttgaagaaataggggctcttgcgcccggatttcagcgtgaattcgccaaacttaagaacctgcttgctaagcgcaaactcaataaactggcgctgatacggcttcatggattcgctcctttggtacttttcatcattgtcagactgcgcgctccccttcgcaggtgtgatgaaggataaagcgcaaaaaaaaggcgacttctcagtcgccttaatcattaattttctaacgccgccttctgcgtcgtgataatggactcgatcccccctcgggctaacgccaggagagtgaggagttcttcatgggtaaacggctcaccttccgcagtgccctgcacctcaataatacggccatcttcggtcatcaccacgttcatgtcggtctccgcggcggagtcttcgatgtactccagatcgcagatggcttcgccatttacgataccgacggagaccgcggccaccatccctttcatcggattggttttcagcttgccggcggcgaccagcttattcagcgcatcggccagcgccacgcaggcaccggtaatggaggcggtgcgggtgccgccgtcggcctgcagtacatcgcagtcgagagtaatcgtgaattcgcccagcgctttcaggtcaaccgctgcgcgcagcgcgcgggcaatcaggcgctgaatttccatcgtccggccgccctgcttgccttttgccgcttcacgcgcgttacgcgtgtgcgtagaacgcggcagcatgccgtattcagcggtgatccagccctggccctggcctttcaggaaacgcggaacgccttcgtcaatagaggcagtgcacagcactttggtatcaccgaattcgaccagcacggagccttcagcgtgttttgtgtaattacgggtcagggtgacgggacgcacctgattagcgctacggcctgctggacgcatgatagaaatctccggcttgaaacgaatgtgagggcgcattatacgaatttcatggcaaaaagcctatgcccactccagccggacgcgccgataatgtcagtccagcgttttacgataagatttcaaccccacaccaatgacaatcaccgccaggcctatcagcggcaagaggtcaggcaacaatgccattgctgaatagcctttcagcataatgcccttaaccaggcggatgaagtaggtcaacggtaaacaggagccaatggctttcgcccagtctggcatactaataaaggggctgacaaatccggacagcataagtgaagggatgaaataaaatgacgacatttgcagcgcctgcagctggttttgtgctaagccagaaataccgataccaattgacagacaaagaaagacataaattaacagcacaaaaaatagtaggaagacgctaccgtgaagggggatatcgaacaacaaaacggcggcaatcaggattaacgtcgcctgaaacagaccaatgataacaaaaggcgttattttcccaataataacctcaagcccggacaacggagagaccagtaaattttctaacgccccgttttctcgctcgcgggtaattgacagggcggtcatcaggattaacgttgtactgagtatcgaccccataataccgggaatagtattaaactgggttatcccctcagggttaaacatgcgatgaatgataagctcgaaatcatcctctttttgcaccacacgcatgtcgcccggcaaatcgtgctgaaacatcgacttcgccacctgcacaagggcgctgagcgcattccccgtggtgatcggatcgatggcatccccctgaattaatagttgtggcttttctccacgcagtaacttgcgcgtaaacccctcagggatcgtcacgataaaagtgacatccccccgcacaaaggctttctgcgccgcctcttctgaatcgacaggaatcatcgaaaaatacccggtattttgcgcttccgtcacaaagatttgactcatgcgttcggtatcataatttagtaaggcggtcggaagattatgcggatccatattgatggcatagccaagaatgatcagctgaaaaagaggtgtcaggagcaccatactgatgctgactttatcacggcgtagctcgtgaatttccttaataaccacgccaatccaccgcgtaacggagaagctaaaattaatttttttcacaattatttttcatcaagtaggtaaatgcatcttccagattggtatccaccttacagaactcataaccctgttgcgtaaaggcaaaaagcgcggattttaacttcgcttcatctctggatgtaatataaagctgattgccaaaaatgaccgtttgctcaatatccggcaagcgctgtagctggctttcaagcagcgtcagaccggcgccgctggttcgcatggtgatcaaattctgggaggcgataatcgacgcaatagtgccattcgccagcagccgaccataagatagataggcaaccttatggcagcgctcagcctcatccatataatgcgtgctcaccagtatcgagatcccccggtcagagagctggtgcagcatttgccagaactctcgccgcgccttgggatccacgccagcagtcggctcatccagaaatagcaaaacaggttcatgcaacatacaggcggcgagggccattctttgcttccagcccccagaaagctccttagccagctggtgctgtcgggcagtgaggcctaactcagaaagcgcacgttcaacccgatctctacgctgatcgaggctatataatcgcgcaataaaaagtaagttttcccgaatagttaaatttccccacattgagaaatactgggtcatgtagcctatctttttctttatcttttcccgctgcgtaaagatatccatacccagacaagtaccttcaccggaatccggcgtaatcaaaccacacatcattcgaatcgatgtcgtttttccgctaccgttcggaccgagaaaaccatagatctcgccttttgctacctgtaaagagaaatcctttacgacgtgatgctcgccaaaatgtttattgagattttttacatcaatacaaagattattcatcgccaataatctccacatcaaacggttggccgattttcatccgccctgcctgctgcagcgcagggatagcctccgccataaaaatgagcttctcacgacgtttcgtactataaataactggaggcgtaaactcggcctcagggctgatatagttaataacgccagcaatgggctcagcgcaaccatcgcatataagttttaccttagatccgattttaaatttaccgagcttcgcttcgggtataaagaagcgtacttttatattctcaggaggtaacagactgattattggtttaccagcagaagggcgctccccggcacgataaataatatcgaagactttagcattgaccggagaaacaatcgtcgtttgctggacatcccacagcgccttatcccgttcgagttttgccgcggccaccattgagcgctgcttgctaatctcatcctgccgggcagggagttgccgtgctttgagttgattaattaactcttcaacctgtgcgcctttttgagttaattcatcccggatatcctcccattccgcaagcgatatggcatgattggcgtaaagattacgatatcgcccaagctgccgctttacctgggattctgccgattgtgctttttttatctgcgaacgtataatatccaactcttcaggccgttcgccagattccagatttcgtaatagagcgctctctgctgatagcttttcctcagcgcgcaggaaaatattttgcgcatcgaaggactcaatcttcactaactcctgtcctgcggcgacgttatctcctttattgatcaagatccgttctattttttcattaccagaatatgaaaggtatacaaattctccatgtgaataaccggataacatgttatctggtttgttatcacacccggtgagtatcagcaccgatatcaatataataaatacatttattggctttcgcattaaaacgcatccatacgcatatcatttcccttatcactacggtctggattgaggcacgctcgctccaggaccggacaatcatcgtcagtttaatctcttaaataatgcttaacgtagctttcattcaatttatctatagagctcagatttaacccagctatcgaattaaaagaatcatcttttgtgaatgcaagaatcgacgatccgcccggggagaaccatttagcactctgtttaaaaggccagggaagttcataaccttcttctctcagcaggtgattgagcatgctccagtctgctctaaaatcttcgccacaaaatggagtatcatcctgtacattttcggcagtgaacaatgctatcggcgaacaaaaatcagctgtcgaggaaaagtatatattatagaaactgatgatgagtttctgtactttttcaggaaaagttccaggaatggtcagcacacccagcaagtatttatagtccggatatctttttataaagtcaaatatcccttgccataaataatcaagcaccttacttttttgataaggtttctgaataaagccgcggccaatttccacacacttctctaaacaggaataggcattatcatggtatttaaacaagctgttgctatagaggcctgttacaccatgttgggccagctgctcgccaacgggcataacacgatatgctcccaggatttccacatcagaaggatcccacaaaatgatatgataataactttcatcaaaaacatcgttatctcggtcgttaccagttccggcaccaatatcgcgataacagcgttcgcgtaagcgccctaactcatcaataataggtgaggttcggttagtattacagcgatatatcactagttttctaccgtcttcaaactgccttaatatttcgcactcctctattgcgctaattagctcctttttacctggttctaattcttgcggcgcaatcgtatctaacatagccgggccattcttcgctatactctggaggtgcgtcaaacatacatttgccgcggcagaaagatctttattgtattctttaaacgaggataaggctatttgctgtcctatattgattttcatggtcttgccatgatggcggagagcttcacgaataaccatcatgttcgacagttgccgccagaatgttgcagtaagataataaatcttactgtttgctcccgtaatatgaattggtaccaatgctgcattatttctcatagcaagctgtaaaaaaccggggttccacttatgctcctgtaacccggaaagagaccagttagccagcttacccgcaggacatataatcaatacgcctccttttcgcaggtgatcgttcatctcgcggaattttttatggctcatcttaccggccatattctcaattccaatggtaagttccgatacctgggggaatataattggcaaaacgtgattagctattatttttatatcactcctgactcgggagaccgtatgtattaagctaagtccatcgataaccgtcggatgatttgaaataacaaccgtagccccatgcccaggtatgttgttaagttggtggtgttcgctttcacatttcaactcaaggagttcaacaactgcattaacccactcgaccccatttttattaacgagtcgctcgttatatattaagcgagaaaataccttattgccaaatgccgtcctgaacagccattttttccaaaaaggtatggttgtatttggaaaaaattcccttacgactctgtcaaagatagcgtccatattaaaatcctttttatagaactcatcttaaacgactatactagcgttctttcagtcggacaataccgcataaaacttaaaaaggccaaaacaaaactattagatataattaatacaacagtattctcaccataaatacaatcaccaaagttttaataaatttatagtaatcaatgcaaaaaaaacatacataatgcttaaaggtaataccctatctcatttctggtggttatacttcctaaaactcacagaatagcttgtctggcggtatatgcatttgtacaaaggcatccgaattccatgcccgcatctaatatcagaaaatattaactacggattcccataatatataaccccacctacagcccctggcgaaaataactttgcggcgatatcccttaaaacaatcgtccttgaagtatttcatcactattcctgttaagtcaccgcccgcacggctataatccttgcattcattattacgaaaacaggaacgcctatgatccgcagtatgaccgcctatgcccgccgtgaaatcaagggtgactggggtagcgccgcatgggagctgcgctcggtaaaccagcgctatctggaaacgtacttccgcctgccggagcagttccgtagtctggagcccgtggtacgcgagcgcattcgcgcccgcctgactcgcggtaaagtcgaatgcaccttgcgttttgaacaagatcccagcgctcagggtgaactcatcctcaacgaaaagctggctaaacagctggtaaacgctgccaactgggtgaaaatgcagagcgatgaaggggaaatcaacccggttgatatcctgcgctggccgggcgtgatggccgccaaagagcaggatctcgacgccatcgccgccgacattctggccgctcttgacggcgcgctggacgacttcatcgtcgcccgcgaaacggaaggccaggccctgaaagcgcttatcgagcagcggcttgaaggcgtgagcggcgaagtagcgaaagttcgcgctcatatgccggaaattctccagtggcagcgcgagcgtctggtcgccaagctggaagatgcggaagtgcagctggaaaataaccgccttgagcaagagctggtgctgatggcgcagcgtatcgacgttgccgaagaactggaccgtctcgaagcgcacgttaaagagacctataacattctgaagaagaaagaagctgtgggtcgccgtctcgactttatgatgcaggagttcaaccgtgaatcgaacaccctggcgtcaaaatcgattaacgccgaggtgaccaactccgcgattgagctgaaggtactcatcgagcaaatgcgcgagcaaatccagaatatcgagtaacgctttctcgtttgttaatgtatttcggtatccagggccatgataaatcatggcctttttatttatctctctcacgggcgaatgataagaatctacttataaaaaatagtcgtccagttttcggttgtggcaaataagcacaacgcggcacagtcaggaaaacactaccgcgagagaaaagaatggactttaatgcgcttcaccagcaaaaccaacctttgttgcttgccaatgtctgggatgccagcagcgctcaggctgctcagcaggctggttatcaggcgctgggatcctccagcgctgctatcgccgcaatgttagggtatgaagatggcgaagagatgagttttgacgagctgttttatgtcgtctcacgcatcaaaaccgttagcgaactgccgttaagcgtcgatttagaggcgggctacggcgcgacaaccagccacatcattgacaatatccggcgtctggcgcatctcggcgtgagtggaataaatctcgaggatagtcatgtggtggatagtacgcgtcgtcttgacgatgcggagcgctttgccgtcaaactgcaggaaatcacccgcgcctgtcccggtctgtttgttaatgtccgcaccgatacctttcttctcaacgtacaagatgcgctggttcaaacgctctatcgcggtcaactctacgccaaacacggcgcatgcggtttttttgtgccttgcgtcacccgcgcggaggatattaccgccatcgttcaccacgtgcctttacccttaaacgtaatgtgtatgcctgagctggctgacttcagcaccttatcgactctgggcgtaaaacgaatttcgatgggcaattttatttatgctgcgacgcaggccagactgaaagacttattatgtcaggtgcaaacccaacactctttctcaggtgttttttgaccatgaaaattaccgacagcatgcagtgcgatatctggtatcaggcgctgcttgaacgcgcggtggaattcaccggcgtttttttcgtcggcgtgaaaaccaccggcgtattttgtatctcggtctgtcgggcgcgaaaaccccggcgggaaaacgtcgaattttataatgactttaaatccgcgctggatgccggcttccggccatgcaaagtctgtcgcccgacggagaatgcccggacggcccccgcctttgttgaacaagcgctccgcctgctgcgagaagctccaaaggtccgcctcagcgatagcgagctacgtcagcacgatattagcccggaacgcgttcgccgctggttcctgcaaaaccacgggatcacctttcaggcttttcaacggatgcagcgtttgaatatggcgcttcaggaattaaaagcaggccgctcaactaccgatgtcgctttcgatagcggttacgagtccttaagcggcttcggctatacctgcaaaaaattgaccggtttcgcacccagcgcgcaacgccaggttgttttaattcatcgttttaccaccccgttagggccaatgtttgtttgtgcaacgcaacggggaatttgtctgctggagtttgtcgacagacgagcgctggagtcagaattcagcgacctgcagcggcggttcaacgccagcatcatcgcaggtgaaaatgcccacaccaggcaggcgcaacaggaaataacggagtatttcgccggacagcgtcaatcgttcgaggtggcgcttgataccccaggcagcgaattccagcgagcggtctggcgccgtttacagcacgttagcttcggtgagacgacgcattatcaatcgattgcgatggagataggtaaaccaacggccacgcgcgcggtggctgctgcaaacggcgctaaccgcgtcgcgattatcatcccgtgccatcgaattatcggcaaagatggttcgatgaccggttacggcggcggcattgcacgaaaaatatggcttattaaccatgaggcaaccatcagggaaaaacgcggctgattttactttcaggatcaacgggcccctccctgactttcaccgcggctcggtaagcctattttttatccagcgcccggcaggttaaaaacgcccctgccgcgcacagcagcgccggagccagatagctgtgatccatgtgggtaaactccatcaccagcgccaccgcggtcagcggcatctgcatggaggcggcgagaaacgcggccgcccccaccacagcgaagctacttttatcaccgccagggaagccgagctgccagagcgcgcagagcagcaggctgaccaatccgcccaccgccagccctggggttaacaatccaccctccgcgccgccgcgcagcaccgccagaatcaccaccatcttcaatactaacaggacagcgaccatggagagaggcagcccgtcgctgagcgccagctgcattggacccttgccattgcccggaagctcggggaaataaagactcaggatggcaagaagagaaaaccccagcagacagaacaccggcatctgccagttacttcgcgcgcgtgaacgcgccgcgctggtcgctttgcgaaagagccaggcgccggtgccaagaatcgggcccgccagaatcgcccaccagagaaaggtgtgcggaagtgcgctggaaacaaaatggtattgcgattcatcccctaaccccagggtggccgtccaggcggcaatcgccgaggtcattatcgccgctagcgttttttcccagctaaacgacagcagcatgacctcaaggctgaacaacgccccggccagcgggacgttatagaccgccgccagacccgcgcccgccccacaggcaatcagcgtgcgggtttcatcttccagcaggcgcagcttacgcgccaccatccccgcccccagcgcgcccatttcccggggcgccacttcgcggccaagcggggagcccagcgctacggtgacgatctgcagcagcgcgtggatcgtcgtggtgcccgcgggcatgggtacgcaggggttggccaccgccgccgcaatggaaacccgcctctgcccatagcgaccaagcagccaccagccaaatccggcgacggcgccgccggccacgattgccacgatgcggcgtggccaggacgactccgtgacgccctgtaaaaatgacaccgaaccgacgatctgcccataactgtaaccaaaagccaggtgctgaatcgcgtgtaaaattagtgccaaaaccatgccggacagaccggccagaatcccggttaataccacggctatcaggcggatcagatgatttttattcccggcggcgacgctcattttctctggccttgaaaaggaaaaataaaagaataaaggacgagacttaaacattgcgtaatcatagtgttttcgatagtgatacccatcgcttcacttagcattactttttctaatcaataaaaatccctaaaaaatcaatcaacctttaaatcaagccatcacagatactatttccattaatttttcctggcgtaaatgattcgctttagaaaatctcaatcgtgatcctgcgcacaaatcgttaacctgcccgccattacctggggggatctatgctgcttcatgttctgtatttaatcggtatcaccgcggaagccatgaccggcgcactggctgccgggcgccggcggatggatacgtttggcgtcatcattatcgccactgcgaccgcgctgggcgggggttccgttcgcgatatcctgctggggcactatcctcttggttgggtgaagcatcccgaatatgtcatcattgtcgccgtcgccgccgtcctcacgaccattgccgctccggtgatgccgcaccttcgtcggctgtttctggtgctggacgcgctggggctgatcgtgttttccatcatcggcgcgcagatcgccctggacatgggcgaaggcccggttatcgcctctattgccgccgtgatcaccggtgtcttcggcggcgtactgcgcgatatgttctgcaaacgcatcccgctggtcttccagaaagagctgtatgccgggatctcctttgccgcagccgtactctatattgctctgcaacattacgtcagcagccacgatgtggtggtgctggctacactgctgttcggctttaccgcccgcatgctggcgctgcgctggaaactggggctaccggtcttccactacacccatgacgcccactaaccgccttaaaatccggggatgcgctgcccgctaagccattgcgccagcgccaccacgtccggatggtgcaggaaagccaccagctggcgggctctgatctcccccacgccaggcagcgtgcgccattgcgcttcactttttgccgccagcagatgccagttctcgctttcgagctgcgccagcgccccctgcggcaccgggatccccatcgccagcacccagcggataaaaggtcgtttgcgaacgagatcaaactgatgccagaggtgctgcccgcgggcggcggaaatccctggcaccgcctgcagctgctcaacggtaagcgccagccaggaaaaaatatgcgtcatcgggttttgctgctgaatgacgcgccataaattttcccccacgccatcgacattcagggcggactttgatgacaaccagatcagcctggaaagaaactgttcgctgcactcaggggtggcgaaatagcaggttagcgcattaaatttcgccggcggcggcgtcggtttatggcgctcggccgtccgccagacgacggcgtcgacccgaggaataccctgccctgccagactgatctgcagctgatcgccaaccccaatatccagcatctgccagcgggacacagagccaacgttaacccgctgcacgcgtttatcatccagccgctggggctcaagctcggccaccacgttgagtctgccgctgcggccgatactgaaacggatcgcccgtacctgcatcacccgcgatgccggaggatatttccaggctgccagccactcgccctttccgggcgaccagactcgtcccggcggctcgcgtccttcgcgcacaatcacaccgtcgctgacgaagggcagcggcgagcgataccaacgctggcgccactgcgccacctgctcgatgcgcgacaccggatgggtatattgtccgctgtacttaaaccccgcctgcgccagcagctgctgacgacggcgcatatccgacgggccgtctggccaggcccagataaaaacgtccagttgactgagcgccgctgccgcgtcggctcgcatcatcaacccggcgactttcgcccgcgcattcatccccccggtctgctgctggacatggccgtcccggcgcagaaacagttccccctgcagtacgctgtcggccagttcaccggtcatcactttcgccagcgccgggatctgccgcgctcgggcggtccatgcctcaccgcgtagaccatcgccgcggctaatggcctgaaccagacgcccctggcgataaacgagagtcaccgccacgccgtccactttaggctgtatccacaggtcggatttatttttcatccagcgggcaacgctgtcctcatccgccagcttgcgcacgccggtatgggccaccggatgacgcgcatcgccggtgggcggaggcagatcgtcatcctcaggcgtcgcgcccggaaagcattgtcgccactgcgccaggcgcagggtgagctggtcgtaaacgtcatcgctcactccgctggcgccctgccgccagtaagcctctttccaggcgacaatttgctgatgaaggcgtgatgtctcctgccttcctctggccagcggccagtccggacacgtcgccagcgcgctggcagagaacatccctaacgccagccaccaccctcctttacgcattgcagtcccctcctccatcacctggcggagagtctgcggcggaatgccgcgagccgcgacggaagctttttcgccttgcgaagcgccttccaggatttacgcctctttgcagcaacggctggcgaattcaggaaaacggcaggcaaaatgaaagaaacagcggcaaaaagtgtgacaatgactgcgtcacgccgcggcgacgtgtataataggctcgtatgtaggacctctttcgataaccacatacaaaagacactcatggctcaaggcacgctttatattgtttccgcccctagcggcgcgggtaaatccagcctgattcaggctttattaaaaacccaaccgttgtatgacacccaggtatcggtctcccataccacgcgggcgccgcgtccgggtgaagtgcacggcgaacactatttcttcgtgaatcacgacgaattccgctcgatgattggcgaaaacgcgtttctggaacatgcagaggtctttggcaactattacggcacgtcgcgtaaagcgatcgagcaggtgctggcgaccggcgtcgatgtcttcctcgatatcgactggcaaggcgcgcagcagatccgtaaaagcatgcccggcgcgcgcagtatttttattctgccgccgtcaaaagatgaactggaccgtcgcctgcgcggccgcggccaggacagcgaagaggtgatcgcgaaacggatggcccaggccgttgcggaaatgagccattacgcggaatatgattacctgattgtgaacgatgattttgacaccgccctgagcgacctgaaaaatatcatccgcgctgaacgtctgcgcatgagccgccaaaagcagcgacatggcgctttaatcaccaaactattggcagactgaacccacattcagtatcatgcccagtcatttcttcacctgtggagcattttaagtatggcacgcgtaactgttcaggacgctgtagagaaaattggtaaccgttttgacctggtactggtcgccgcgcgtcgcgctcgtcagatgcaggttggcggaaaggatccgctggtaccggaagaaaacgataaaaccaccgttatcgcactgcgcgaaatcgaagaaggtctgatcaacaaccagatcctcgacgtacgtgagcgccaggaacagcaagagcaggaagccgctgaattacaagccgttaccgcgattgctgaaggtcgtcgttaatcacacagcgggtcgcccttgtatctgtttgaaagcctgaatcagctgattcaaaactacctgccggaagaccagattaagcgtctgcggcaggcgtatctcgttgcacgtgacgctcacgagggtcaaacacgttcaagcggtgaaccctatatcacgcacccggtcgcggtagcctgcattctggccgagatgaagctcgactatgaaacgctgatggccgcgctgctgcatgatgtgattgaagatacccccgccacctaccaggacatggaacagctttttggtaaaagcgtcgccgagctggtagagggggtgtcgaaacttgataagctcaagttccgcgataagaaagaggcgcaggccgaaaactttcgcaaaatgatcatggcgatggtgcaggacatccgcgtcatcctcatcaagcttgccgaccgcacccacaacatgcgtactctgggctcgctgcgcccggataaacgccgccgcatcgcccgcgaaaccctggaaatttacagcccgctggcgcaccgtttaggcatccatcacatcaaaaccgagctcgaagagctgggctttgaagcactgtaccctaatcgctaccgcgtcattaaagaggtggtcaaagcggcgcgcggcaaccgtaaggagatgattcaaaagatcctctccgaaatcgaagggcgtttgcaggaagcagggatcccctgccgcgtcagcggtcgcgagaagcatctatactccatctactgtaaaatggtgctcaaagagcaacgttttcactcgatcatggatatctacgccttccgcgttatcgtccatgatgccgatatctgctatcgcgtgctcggccagatgcacagcctctacaaaccgcgtccgggtcgttttaaagactacatcgccattccgaaagctaacggctatcagtctttgcacacctcgatgatcggcccccacggcgtcccggtcgaggtacaaattcgtaccgaagacatggaccagatggcggagatgggggtagcggcgcactgggcttataaagagcacggcggcgaaagcagcaccaccgcgcaaatccgcgctcagcgctggatgcaaagcctgctggagctgcagcagagcgccggtagctcgtttgaatttatcgagagcgtaaaatccgatctgttccccgatgagatttacgttttcaccccggaagggcgcattgtcgaactgcctgccggcgccacgccggtggacttcgcctacgcggtgcataccgatatcggtcatgcctgcgtcggcgcgcgcgtcgaccgtcagccctatccgctgtcgcagccgctctccagcggtcagactgtcgaaattatcaccgcgccgggcgctcgcccgaacgccgcctggctgaactttgtcgtcagctcgaaagcgcgcgccaaaatccgtcagctgctgaaaaaccttaagcgcgacgattcggtcagccttggccgtcgtctgctcaatcacgcgctgggcggaagccgcaaactcgccgagatcccaccggagaatatccagcgcgaactcgatcgcatgaagctggcctcgcttgacgatctgctggcggaaatcggtctgggcaacgccatgagcgtcgtggtggcaaaaaacctgcagcagggcgaagccgctgcggcgccggtaccggctaacgcgtcgaaccacggtcatctgccaatcaaaggcgccgatggcgtgttgatcaccttcgccaagtgctgtcgtccaattccaggtgacccgattatcgcccacgtcagcccgggtaaagggctggttatccaccatgaatcctgtcgtaacattcgcggctaccagaaagagccggagaaatttatggcggttgagtgggataaagagaccgctcaggagttcatcaccgaaatcaaggtggacatgtttaaccaccagggcgcgctggctaacctgacggcggcgatcaacaccgcgtcttccaatatccagagcctgaatacggaagagaaagatggccgcgtatacagcgcctttatccgcctgaccgcgcgcgaccgcgtgcatctggcgaatatcatgcgcaaaatccgcgtcatgccggacgtgattaaagtcacccgtaaccgaaactagctttatgaactcaaagcgctacgagcgtatctgcgagatgctcgccaggcgtcagcctgacctgacggtctgcatggagcaggtccataagcctcataacgtctctgcggtcatccggaccgcagatgccgttggcgtacacgaagtgcatgccgtctggccgagcagccggatgcgtaccatggcctccgccgccgcgggcagcaacagctgggtgcaggttaaaacccaccgcactatcgcagatgccgtcggccacctgaaaggccagggcatgcaaattctcgccactcacctttccgacaaagccatcgattttcgtgaaatcgactatacgcgtccaacctgcatcctgatgggtcaggaaaaaaccggcatcacccaggaagcgctggcgctggccgatcaggacatcattatcccgatgatcggcatggtgcagtcgctgaacgtttccgtcgcctcggcgctgatcctctacgaggcgcagcgccagcggcagaatgccgggatgtaccaacgcgccaacagcatgctgccgccacaagagcagcagcgcctgctgttcgaaggcggctatccggtgctggcccgcgtcgcccgacaaaaaggtctgccttacccccacgttaacgagcagggcgaagtggaagccgatgccgcgtggtgggccaccatgcaggctgcgaggtaaacccaatgtcaggccgcctgttagatgccgttccgctcagttcactcaccggtgtgggcgctgcgcagagcagcaaactggcgaagattggcctgcatacggttcaggacctgctgctacacctgcctttacgctacgaagatcgcacccatctttacccgatagccgagctgcttcccggggtttatgccaccgtggaaggtgaagtcctcaacagcaatatcaccttcggcggccggcggatgatgacctgccagatcagcgatggcaccggcatcctcaccatgcgctttttcaacttcaacgcggcgatgaaaaacagcctcgcgaccggtcgtcgggtgctggcctacggtgaagccaaacgcgggaagtacggcgccgagatgatccacccggaatatcgcgtccagggcgatatgagtactccggagctgcaggaaacgttaaccccagtttatccgaccaccgaaggcatcaagcaggcgaccctgcgcaagctcaccgatcaggcgcttgagctcctggaaacctgcgcgattagcgaactcctgccgccggagctggcgcaggggatgatgagcctgccggaggcgctgcgtacgctgcaccgcccgcctccctccttgcaacttagcgagctggaaagcggcaagcacccggcgcagcagcgtctgattctggaagagctgctggcgcataacctcagcatgctggcgctgcgggcaggcgcccagcgctatcacgccctgccgctcggcgccaacgataccctgaaaaaccaactgctggcctccctgccctttaagcccaccggcgcgcaggcgcgggttaccgccgagattgaacacgatatggcgctggacgtgccgatgatgcgcctggtgcagggcgacgttggctccggtaaaacgctggtcgctgccctggccgccttgcgcgctatcgtccacggcaaacaggtggcgctgatggcgcccaccgaactgcttgccgagcagcatgccaataacttccgcaactggttcgaaccgctgggtattgaagtcggctggctggcgggcaaacagaaaggcaaagcccgccaggcgcagcaggaggctatcgccagcggcgaggtgcagatgattgtcggcacccacgccatcttccaggagcaggtgcagtttaacggcctggcgctggtgattattgacgaacagcaccgcttcggcgtgcatcagcggctggcgctgtgggagaaaggtcagcagcagggattccacccgcatcagctgatcatgaccgccacgccgatcccccgcaccctggcgatgaccgcctacgccgatctggacacctcgattatcgacgagctgccgccaggccgaactccggtgaccaccgtcgccatccccgacacccggcgcagcgatattatcgaccgcgtgcgcaacgcctgtacccatgaaggtcgccaggcctattgggtctgtacgctgattgaagagtccgatctgctggaagcccaggcggcggaagccacctgggaagagctcaaactggcgctgccggagctcaatatcggcctcgtccacgggcggatgaaaccggcggagaagcaggcggtgatgcaggccttcaagcagggcgagatgcatctgctggtagccaccacggtgattgaagtcggtgtcgacgtgcctaactcaagcctgatgattatcgaaaacccggaacgtctgggtctggcgcagctgcaccagctcagagggcgcgtcgggcgcggcgcggtcgcttcccactgcgtgctactctataaatcgccgctctccaaaacggcgcagaaacgtctgcaggtcctgcgcgacagcaacgatggtttcgtcattgcccagaaagacctcgaaattcgcggtcccggcgagctgctcggcacccgccagaccggcaacgccgaatttaaagtggcggacttactgcgcgatcaggcgatgatccccgatgtccagcgcattgctcgccacattcatgaacgctatccgctgcaggcccaggcgcttatcgagcgctggatgccggaaaccgaacgctattccaacgcgtagcgcgcttttgccgcgctgcgggcaacttttctacacaacgagtggattatgaaacgagaactggccatcgaattttcgcgtgtcaccgaagccgccgcgctggcgggctataaatggctgggccgcggcgataagaataccgccgacggcgcagcggttaacgccatgcgcattatgcttaacctcgtcaatatcgacggcaccatcgtcatcggcgagggcgaaatcgatgaagcgccgatgctttatatcggcgaaaaagtgggtaccggcaagggcgatgcggtagatatcgccgtcgatcccatcgaaggcacccgcatgacggcgatgggccaggccaacgccctggcggtgatggcggtcggcgataagggctgcttcctcaacgcgccggatatgtatatggaaaagctgatcgtcggcccgggcgctaaaggcgctatcgatctcaatctgccgctggaagagaacctgcacaatatcgcccgcgccctgaacaagccgctgggcgagctgaccgtcaccgtgctggcgaaaccgcgccacgacgcggtcattgcccagctgcagcagctgggcgtgcgcgtgttcgctattcccgatggcgacgtcgcggcctctattctcacctgcatgccggatagcgaagtcgacgtactgtacggcatcggcggcgcgccggaaggggtggtttccgccgcggtgatccgcgccctcgacggggatatgcaggggcgcctgctggctcgccaccacgtgaagggcgataacgaagagaaccgccgcatcggtgaaaatgagctggcgcgctgcaaaaccatgggcattgaagcgggcaaagtgctgcgtctggatgaaatggcgcgcagcgataacgtcgtcttctccgccaccgggatcaccaaaggcgatctgctggacggcatcacccgcaagggcaacatggccaccaccgagacgctgctgatccgcggcaagtcgcgcactatccgtcgtatccagtcgattcattacctcgaccgtaaagatccggacattcagcagcacatcctgtaataccgctttttctctcccaggcaaccgtccgcaggcggttgccctgttcttcgtttatatttgatcaatagagctttcttgcgccttcggggtggaaatctggctcgtctggaccgaagataaggcatcgcttggcaacaggagaagacgatggcggactgggttagcggcaaagtgacaaaagtggagtactggacggacgccttgttcagtttatacgtgcgggcgcctgttcatccgtttaccgccgggcaatttaccaagctcgggctggaaatcgacggcgaacgcgtgcagcgcgcctactcctacgtcaacgcccccggcaatcccgacctcgagttctatttggtcaccgtcccggaaggcaagctgagcccgcgtctggcggcgctgaagccgggcgatgaagtcctggtggtgagtgaagcggcaggtttcttcgtcctcgaggaagtaccggattgcgataccctgtggatgctggcgaccggcactgcgctggggccgtacctgtcaattttgcaggaaggcaaggaccttgagcgctttaataacctggtgctggtccacgccgtccgctacgccgcggacctgagctatctgccgctaatgcgcgaactggagcagcgctacgccggtaaattacgcatccagacggtggtcagccgcgaaaccgtggaaggctcgctgaccggccgggtgccgtttctgattgaaaccggcgcgctggaagaggccgtcggcctgccgatgaccaccgacaccagccatgtgatgctgtgcggcaacccgcaaatggtgcgcgatacccaacagctgttaaaagagacccggcagatgaccaaacatctgcgtcgccggccaggccacatgacggctgagcactactggtaatcaggcgtccgctttccagcgcacgtcctgggtctccttgccgaacttattctcgccctgggtgccgacaaacgcccccaggtcgatcagcatcatgacgataatcagcgtcggcacaaagcgcccgacgccccactgccagacctgcggcaacatcgaccagttccccgccagcagcatccacgccagaaccatcagcagcgcccacagcccggatttgccgcgatcgtgcagccgcttgaccaccaccgccgccgtcggccacagcaggcagacgataataaacgccgccgtctgcaggttgagcagattgctgcctgccagggtaaacagggcgctcatggtcaccagccagatggcaatccagatccagaaatcgcggcggccaatgcgccctttaattgagaataaccactgctgtagggtcatgcgtttttccttatcatcatcgtctgcgtagtttaccctggcgtcgtgactttttgacaagcgccgcgcttcccgatttaatcgtcagcaggcaaaaaaaggaacgacgggcatgaagaagtggacaattttgtggttaagtgggctgatgggccttaccgtcggcccgcacgcgttgtccgcagagagcgaatcgacgaccgcggcagcgccctacctgctcgccggcgcgccgagctttgaccagtcgatcagtcagttccgcgagaaattcaacgccgataacccaaagctgcctctgaacgaattccgttccatcgccaccagtcgcgatcgggctaacctgacccgcgccgccagcaaaattaacgaaaatctctatgcctccaccgcgctggagcgcggcacgctgaagatcaaatccatgcagatcacctggctgccgatccaggggccggagcaaaaggcggccaggaccaaagcgctggagtatatgagcgccatgatccgctccttcgtgccgacttttagccaggcgcaaagccagcaaaaactgcagaaactgctggccgccggcaagggcaagcgctacttcgccgataccgaaggcgccgtgcgctatgtggtggcagatcatggggaaaagggcctgaccttcgccattgaaccgattaagctggcgctatctgaaacgctggaaggtaacaataaatgacaaaaagcaaagcctttccagtgacgagtctctatactgtttcacagaccatgctgccctctggggcggctatattccttaattcgcttaagtagcgtggagaattaaaatgcgacatcctttagtgatgggtaactggaaactgaacggcagccgccacatggtaaacgaactggttgcgaacctgcgtaccgagctggctggcgtaagcggctgtgcagttgccatcgccccgccggaaatgtatctggacctggctaagcgcgcggcagaaggcagccacattcacctgggcgcgcagaacgttgacgtgaacctgtccggcgcattcaccggtgaaacctccgccgaaatgctgaaagatatcggcgcgcagtacatcatcatcggccactccgagcgtcgtacctaccacaaagaatccgacgagctgatcgcgaagaaattcgccgtgctgaaagagcagggtctgaccccggttctgtgcatcggtgaaaccgaagccgaaaacgaagcgggcaaaacggaagaagtttgcgcgcgtcagatcgacgccgtgctgaaaacccagggcgctgccgctttcgaaggcgtggttatcgcttacgaaccagtatgggctatcggtaccggcaaatcagcgaccccggctcaggcgcaggcggtgcacaaattcatccgtgaccacattgctaaagctgacgccaaaatcgctgagcaagtgatcatccagtacggcggttccgttaacgctggcaacgccgcagagctgttcacccagccggacatcgacggcgcgctggttggcggcgcctccctgaaagctgacgctttcgcggtgatcgttaaagcagcagaagcagcgaaaaaagcgtaattcgcttttcccggtggcgacacgcgaccgggttgactgacaaaacgtgggagcccggcttagcacagcgcaagccgggctttcttttgccgttacagtttccccaacagctgataccaggcgtagtccagcggcagtaaaatcagataactcaccgccgccagcgccagacacagttgcatccccgccctcgccgggaccttgcctaaccccatcgccaccacgatcggcgacgcctgatagggcagcagcggcgtggaatagcccagcacctgaatcataatcacgcttagcagcgggaagccggtggcgtcggcaaagctctgggcaaaggtggtatacagcgccggcacgccgttggcggtcataataaagttcagcgcgctggttatcccggtcagggcgagaaagctggtgaaaggattgtctttatccaggggcatcacctgcagcagcgcattgcccaccgcgccgccaatcccggtttgggtgacggcgatcgccagccccagaatcccggcgacgtaaatgcaggtgcgcatattcaccccgctggcaaactcctcgccgttaataaagcccacccgcggcagcagcgtgatcacagccgccgccaggccggtccacgccgggccgacgccgtgccagctctcggtcacccatagcgagaggaccaccgccagcagccacgccagacgtttctcgtcgcggctcatcggcggcagcggcgccaggtcgcgcggtggatgcggcttgccgggaaacagccagcaaatcagcgccaccagcaccgcccctttcagccagccaagcaccggcgtatgcagcagtaaatagggaacataattcagatggataccgtacgagccttccgccgcgccactcatcaccagattcggcacgttggcgggcaaaatcgtcgccgacagctgaaaggtgccgaaccccaccgccagcgccaggccgaaccagccgcggctaccgtcggcaatgcccgcgcggcgggccatcgccgccacgatcggcatcagcagcgcgatgcgccccatgttggagggcatcacgaacgccagggcgtagctcaggagtaccacgctggcgaccatccgcggccaggagtcggtgagcctggccgacagcgcctgcgccgcccggtccgccagtccggttttacggatggcgatgccgagcacaaagccgctgaacaccagccagaacgccgaagaggcaaagccgccgaagatcacctccggcggagcgattttcgccatcatcgccgctgcgaagaacagcagcgcggtgataaattccggcagcagcgacgtcgcccagagcacgatggtgacgccgacaatcaatgaaggaaggaacagcgggtgggtaagccagagcgacatgcctgtctcctgtcgtttttttcagcaagaatacgacgacaggtaagacaggtaaacgccagaactagtggtttgcgttaaggatggcgcagcgatgatcctgaatttcttccgctgaagcccggttcagggtcagcaggttacgctccgtcgccagcagcaccagcgagccgtcgctctgttgcgccattgccagcgcgaagcgtcccatatgctggcgcgcctccggcacctcttccgccagcatcaggaacgggctacgctgggccagctccgcctccgtcacccggcgcgccaggtattcgtggccctgaagcccgcccggtagcggcaaccagcggctgctgatcgctgcggcatccttatctaactgcgcgcgcacatcggggcgcaggcaggagatatgaatatggaaatggttttgcgtacgtccactgcgcgagttgatcgccagcgataccgcgttatcaggaaccggcgcgccgtggcgctggctcatgatttcacgcccctgccaggcctgccagaaaaagttcggcgtcaacggatccagcagcagcgggctttcggtgccgttgatgcggtaggtcggcatcagcaaatattgcagcgggccgttacggtctttaaacagcacatagccgcccttgaggttcacttccgcgcacggcgacgggttttgctgctgttgctgatggggtacgcactgctgcaggacaatcttgcgtaatgcgtccgggttgccagagtgcagccagtagtagccgcccgccagcgccgcgaggatcgccaccagcagcgccagcaaaaagtatcttactcttctcattttcattccctgttaagcctgaagcggaagagtagcgtaatttgatgactaaatgaaaacagatggtggacggggcgttgtcccgggtggcggctgacgccttacccgggctacgcaccgcgcaaaactatagccctgctaagcgtagcgcaagcagggacaagagaattaacgctggctaatctggtcgaaggtgccgccgttggagaagtgctctttctgcgctttcgtccagccgccgaactcctgatcgatggtaaacagcttcagtttcgggaattcgttagcatatttcttcgccacattcggatcgcgcgggcggtagaagttcttcgccgcaatctcctggccttccggcgagtagagatacttcaggtacgcttccgccacctgacgcgtgcctttcttatccaccactttgtcgaccaccgagacggtcggctcagccagaatcgactcactcggggtcacgatttcaaacttgtctttgcccagttcgttggttgccagcagcgcttcgttttcccaggcgatcagtacgtcgccgataccgcgttctacgaaggtattggtcgaaccgcgcgcgccggagtccagcacttccacgtttttatacagcgccttgacgaattcctgggctttcgcctggtcgccgtgattctgatgcagggcatagccccaggccgccaggtagttccagcgggcgccgccggagcttttcgggttcggggtaatgaccgacacgcccggtttgatcagatcgttccagtcatggatctgtttcggattgcccttgcggacgaggaacacgatggtggaggtatacggcgcggagttatccggcaggcgtttcagccagtttttatcgatgcggccgcgttcggcaatagcgtcgacatcgtaggccagcgccagcgtgaccacatccgcttcaataccgttaatcaccgaggtcgcctgtttgccagagccaccatgcgactggcggatcaccacgttgtcgccggtctcctgcttccagtgtgcgctaaacgctttgttgtactgttcgtacagctcgcgcgttggatcataagatacgtttaatagctgaatgtcttttgccagaacgctggcggatgccagcaacagagttaaccctacgccccacttattcatcgcaccgctctctttatgtgtgttgtgatgggttaagcgtgccagaaagcgattcaatgattaaagaataaaaaaagattggctataacttgcggatataaagacgcgagtaaggatgaccccctcccgggcgggagagggcgcgaagcgattagacttcttccatgcgacccagcagcgcctgcagacgttcctgccagccctgctgctgctctttcagctggctgttttcgcgctccagctcttcacgaccatgctgcgcgctctgaacttcctgcaccagggtgttgttcttttctttcagctcttcgatttccatctgcaacagagtgatggtatcaatcgcctgctgaaccttagattctaatttctcaaacacttctaatgacatcgtcatacctctcctgaacttgcaaggcgttgatagaaactcgtgtttcgtatacgcggtcccgccttaacgaaaattagcgcacatagcggtgttatcgtcgattgtatgaatccccgccgcccctgtccagcggcaagccgcgtagattgcggtttgcaacacttttcagtctttacctggtgctttcagcgcagttcgctcgtagttcatgggtcaatgttaattttatggttaacaaaatgcgtggtgaaacgctccggcagcgctctcgatgcgcgcaaatggcgcgaaaacgctcattttcttgacgagacacacacatttgaagttcgatatttctcgtttttgctcgttaacgataaattaacactatgcctacatggcaatatggtcgtctgtgaccaccctacatacaataatcatcaccacgcttcaggattcgattatgagccaaacatcaaccttaaaaggccagtgcatcgcagagttcctcggtaccgggttgttgatctttttcggcgttgggtgcgtggctgcgctcaaggtcgcgggagccagcttcggacaatgggaaatcagcatcatctggggtctgggcgtcgccatggcgatctacctgaccgccggggtctccggtgcgcaccttaacccagcggtgactatcgcgctgtggctgttcgcctgcttcgaaggccgcaaagtggttccttttattatttcgcaattcgctggcgccttttgcgctgcggcattagtttacgggctttactacaatcttttcctcgattatgaaaccacccaccatatgattcgcggcagcgtggaaagcctcgatctggccggcattttctccacttacccgaacccgcacatcaattttgtgcaggccttcgcggtagagatggtgattaccgctatcctgatgggcgtcatcctggcgctgaccgacgatggcaacggcataccgcgcggcccgctggcccctctgctgattggcctgctgattgcggtgattggcgcctccatgggaccgctgaccggcttcgccatgaacccggcgcgtgacatcggcccgaaagccttcgcctggctggcggggtggggtgacgtcgccttcaccggcggcaaagatattccttatttcctggtgccgctgtgcgcaccggtggtcggcgcggcgctgggcgcattcagctatcgtaagctgattggccgtcacctgccttgcgacacctgcgtggaggaagagcaacagagcccctcctcttccaccgctcaacataaagcttcgctgtaatctgactacgggacaccgactatgaccgacaaaaaatatatcgttgcgcttgaccagggcactaccagctcccgggccgttgtgatggatcatgatgccaatatcgtcagcgtctcccagcgagaatttgaacagatttatcctaagccaggctgggtcgaacacgacccgatggaaatctgggcttcccaaagctcgacgctggtcgaagcgctggccaaagcggatatcaactccgatcagatcgcggccatcggcatcaccaatcagcgtgagaccgtggtggtgtgggagcgagagaccggtaaacccatctacaacgctatcgtctggcagtgccgccgtaccgcggagatctgcgagcagctcaagcgtgacgggatggaagagtatatccgcaaggccacaggcctggtggtggacccgtacttctccggcaccaaggtgaaatggatcctcgaccatgtcgaaggttcccgtgagcgtgcgaagcgcggcgagctgctgttcggcaccgttgacacctggcttatctggaagatgacccagggccgcgtgcacgtcaccgactacaccaacgcctcgcgtaccatgctgttcaacattcacgacctcgactgggacgacaagatgctcgacgcgctggacattccgcgcgccatgctgccggaagtgcgcaagtcttccgaagtgtacggccagaccaacatcggtggtaaaggcgggacccgtattcctatcgccgggatcgccggtgaccagcaggcggccctgttcggccagctgtgcgtcaaagaagggatggcgaaaaacacctacggcaccggctgctttatgctgatgaataccggcgaaaaagcggtcacctccacccacggtctgctgaccaccatcgcctgcggcccgcgcggcgaggtgaactacgctctggaaggggcggtgtttatggccggcgcgtctattcagtggctgcgcgacgagatgaagctcatcagcgatgccttcgactccgagtacttcgccaccaaggtgaaggataccaacggcgtatacgtggtacccgcgttcaccggtcttggcgcaccgtactgggacccgtatgcccgcggcgcgattttcggcctcacccgcggcgtgaactccaaccacattatccgtgcgacgctggagtccatcgcctttcagacccgcgacgtgctggaagcgatgcaggctgactccggcattcgtctgcacgccctgcgcgtagacggcggcgcggtggctaacaacttcctgatgcagttccagtccgatatcctcggcacccgtgtcgagcgtccggaagtacgcgaagtgacggcgctgggcgcggcctatctggccggtctggcggtcggtttctggcagaatctggatgaactgcaggagaaagcggtgattgagcgcgaattccgcccggggattgaaactactgagcgtaactatcgttacagcggctggaagaaagcggtgaaacgcgcgttagcgtgggaagagcacgacgaagcgtaagattgtgaagttattcccggcttgcggcgtaaacgcctgagccgggctacaaaaccccaaacagcacgatcttgtagcccggacaggtgcgcagcaccgcttccgggttttttatcaaccaaacatcggcagcagcaggtacagcttaatcaccagcgcgttgacgatatcgataaagaacgcccccaccatcggcactaccaggaaggccatatgcgatggcccgaaacggtcggtaatcgcctgcatattggcgatcgccgtcggcgttgcccccaggccaaacccgcaatgcccggctgccagcaccgcggcatcgtagtttttgcccatcatccgataggtgacgaacaccgcatacagcgccatcgccagcgcctgcaccgccaggataataatcatcggcagcgccagcgaggccaactcccacagcttgaggctcatcagcgccatggcgaggaacagcgacaggctgacgttgcccaacaccgataccgcgcgatcgaacacccgatacaaccccgccagcgccaggctgttgctgaggatcacgccgataaacagcacgcagacgaaggtcggcagctcgaagacgctccccgccagcagttgcgcaaccaccttgcccagcgtcagacagatggcgatcagggcgatactttcgatcagcaccagcgaggtgatcacccgccccacgtccggcttttcaaaggcggttggcgccacctgatcgtccggtgtcccgtccggtgaggaagagtgcttcaccagataacgcgccaccgggccgccgatcaggccgcccagcaccaggccgaaagtcgcgcaggccatcgccacctcggtggcgttggcaaaaccgtagcgctcaacgaacagcttactccacgccgccccggtgccgtggccgccggataaggtaatcgacccggccagcagacccattagcggatccagccccagcagcgtcgccatgccgataccgagggcgttctgcagcagcagcaggccaaccaccacgatcaggaaagtgcccagcaccttgccgccggcccgcaggctggcgaggttggcgttaagaccgatggtggcgaagaacgccagcatcagcggatctttcagactcatatcgaaatcaatttcgatatccatgctttttttcagcgccagcagcgccagcgccaccagcagaccgccggcaacgggttcaggaatagtgtatttcttaaggaagggaacggtttgtacgagttttctgccgagtaacagcacgagcgttgcggcaacgagcgtcgataaggtatcgagatgaaacataaaaagctccttatgggcgcatgatccattcacacgcgacgatattcctggtgtctttagcttctcatcatgaggagtcagagggggattttacgcagaacggcggaaaaattgacagaaaaagatattttgtatccttaatgatgcgatttagcatacaaaatgttaattacctcgttgcgcatattcacggtataaatttttatgagcaaacgctggcaaacgtttgcttttggtctacagtccgataaaattcccgctttgccaccttgggattgcttgtgatgtccgttaacaccgcagagtcagaaaatgcgcaaccggttgcgcataaaccagccagcgaattaatctaccgcctcgaagatcgcccgccgctaccgcaaaccctgttcgccgccttccagcacctgctggcgatgtttgtcgcggtgatcaccccggcgctgttaatctgccaggctctcggtctcccggcgcaagatacccaacatatcatcagcatgtcgctgttcgcctccggcgtcgcctctattattcagatcaaagcctggggcccggtcggctccggactgctctccatccagggcaccagcttcaactttgtcgccccgctgatcatgggcggtaccgccttgaaaaccggcggcgccgacgtccccaccatgatggccgccctcttcggcaccctgatgctggccagctgcaccgaaatggtcctctcccggatcctgcacctggcgcgccgtatcattaccccgctggtttccggcgtggtggtgatgattatcggcctgtcgctgattcaggtcggactgacctccatcggcggcggctacgcggcgatggccgaccacacctttggtgcgccgaaaaatctgctgctggcgggtatcgtgctggcgctgattattatcctcaaccgccagcgcaacccgtacctgcgcatcgcctcgctggtgatcgcgatggctgccggttatctggcggcgtggttcctcgatatgctgccggctaacaccgcgcctaccaacagcagcctgatcactatccctacgccgctctattacggcctgggcatcgactggagcctgctgctgccgctgatgctggtctttatgatcacctccctggaaacgatcggcgatatcaccgccacctccgacgtttctgaacaaccggtctccggcccgctgtatatgaaacgcctgaaaggcggcgtactggcgaacggcctgaactcatttgtttccgccgttttcaataccttcccgaactcctgcttcggccagaacaacggcgtgatccagctgaccggggtcgccagccgctacgtcggctttgtggtcgccctgatgctgatcgtcctcggcctgttcccggcggtgagcggcttcgtgcagcacatccctgagccggtgctcggcggcgccacgctggtgatgttcggcaccatcgccgcgtccggcgtgcgcatcgtctcccgtgaaccgctgaaccgtcgggcgatcctgattatcgctctgtcgctggcggtaggcctcggcgtgtcgcagcagccgctgatcctgcagttcgccccggactggctgaaaaacctgctttcctccgggattgccgccggcggtatcacggcgattgttctgaatttaattttcccgccagaaaaggcgtgatctcatgcgttcccggtcgcgcatcggccgggacgtcctccaaccaccagccccatcacggaaataaaccacgcctgccttgagaagtgcgcctaaatcgggcataacacggtgatgtgcatctcacagaatggaagaccatgaaatttcttggaaagctgattctctggctgctagtcgctctgctgctcgtcattattggcgcgtggttcctgctgcaaacccactggggcgcccgccaggccagcgcctggctcagcaatggcaccggctggcaggtctccttcgatgagatggagcacgatttctcctccccctttcatgtgcagttgcgaaacgtcacctttggtcgggaaggcaagcctgccactttggtggcaaaaacggtcgacattggcttcagcacccgccagtttagcgatccgctgcatgcggatgagatagtccttaacgacggcactctgaatctgtcaccccactctgcagacctgccgttcgctgccgaccggctgatgttgcgcaatatggctttcaacagcccggaaaccggctgggcgctcagcgcgcagcgcgtcaccggcggcgtcagcccatggacgccggaggcgggcaatgtgctggggaaaacggcgcagatccagatgagcgcgggctcgatgacgctcaatggcgtcgaagccagcaacgttctgattcagggtaagattgatcagggcgaggtcaccctctccaccctcggcgccgatgtcgcccgcggcaccttaaccggcaatgccaaacgcagcgccgatggcagctggcgggtggataacctccagctcaacgagattcgactgcagagccccgcctcgctggccgagtttttcgcgccgttaaccacggtcccctctctgcagattggccgcctggacatcaccgacgcccgcctgcagggaccggactgggcggtaaccgacctcgacctgagcctgcgcaacctgacccttagccacggcggctggcagagtgaggacggcacgctgtcgatgaacgccagcgaatttatctacggctcgctgcatcttttcgacccgatcctcaatgccgaattctctccccagggcattgcgctgcgccagttcacttcgcgctgggagggcggcatggtgcgcacctccggcaactggctgcgcgccgggaacgccctggtgctcgacgacaccgccttcgccggactggagtacacgctgccggcgaactggaaacagctgtggatgacgccgctgccagcctggctgcaaagcctgacgctgaaaaaattcagcgccagccgcaatctgatcatagatgtggaccctgctttcccgtggcaaattaccgccctcgatggctatggcggcgagctacagctggtgaaaaacggcagctggggagtatggaacggcagcgcgacgctgaacgccgcggcggcgactttcaaccggatcgacgtgcgccgcccatcactcaaactgaacgccacagcctcgacggtcaatatcactgagcttagcgccttcaccgagcgcggcattttgcaggccaccgccgcggtatcccagctgccgcagcgccaggtcaatctgagcttcagcggccgcggcgtgccgctgaatattctgcaggcctggggctggccgtcgctacctataagcggggatggcaatctccagctgaccgccagcggcagcgtgcaggccgatgccccgctcaaaccgacgatcaacgggcagctcagcgccgtgaatatggagaaacagcaggtggcgcaaatcatgcgcaacggcgaggtcagccccgcccccgccgcgccagcgcccgctcccgtcaccccatagcgatgcccattccctctcctctatggggagagggattgcttcccggcaaaactccactctgactactctctccctttcagggagagagttggggtgcgagtcctgaaacctgtgcgcaatacgcggctatctgtacctatttagcgcaacaggttcctttcaaatatcagagttgctataaccaaatcactggaagtcgataaaaaaccgctccctgtacctacaaaaatataaaaggatcaatcatgcctgaaatacgtcagcgtattctggagaatatgcaaaaattctcccgggccatgatcggcgccgtattgttcttgccggtcattggcttaattctggccctcagttcagtattaactaatccgacattaattgctgaaaccagtttcttacatcagcttgggcaaatgctcggcgacaccttttggcctttatttggcaacctcggcttattattttgcgtcggcatcagctatggcctggcaaaggataaaaaaaccgaagtcgcactggtttcagtgatgtgctttattatgtttcttggcgccaaccactcctggctggaacacacccatggactcgccggaaaaattaacggtgaatattatggcaccgggcaaacccagctgctgggctttgtggtggtggatatgggcgttttcctgggcattattctcggctgcacgattgcgtgggtgcacaataaagtctctgccattgagctgcctggcgcgctgtcgatgtacggcggcgccaagctgacgctggtggcgatgacgccggtggttatcttctacgccatcgcctttacctggatttggccctttatgacccacggcatctccgccctcaccggttttatgaaaaatgccggggtcgccggggtcttcgtctatggtttctttgaaaaattccttatccccaccggcctgcaccatttcgtctggtcccccttccagctcacccagattggcggcacgctgaacgtggatggtcaggtggtctccggcacccaggccatattcctcgcctatatgcgccatcccgacctgacgccggtcatgaacgacgcattacgtttttcgcagcaagggatgaccactatctttggcctggcgggcgcctcgctggcgttctaccacaccgcgaaaccggagaagaaagcgatggcgaaggcgattctgctgccggcgattatcaccttgatgctgaccggcatcaccgagccgattgagttcaccttcttatttgtctcaccgctgctgtgggtgatccacgcaacgttaaccgccgcctcgcaggccatttgcgacatattcaccgtacgtccctggggagcatcgggcctgatcgagtttctgatctataacctgccgctgccggtctccttaacgcgctggccgggctatgtccttatcggtatcggccagttcgccgtctactacgtgattttccgcaccctggtggtgaagctgaacctgaaaacgccgggccgggaagatgacgagaacgtgaagctctacagcaaagcagagtaccgccagaaagtcgcgcaaccgcagtcggtcaccgatgacattatccgcggcctcgggggcaaggagaatattctctccgtcgataattgttttactcgcctgcgcgtggccgtgcgcgatatggcgcgggttgatgacacgcaattaaaaaataccggcgccaacggcgtcgtacgcaatcgaaatgaagttcaggttatttatggcgtcaaagtgggacaggtacgttcccgggttgataactggttagcagaaaattaatgaggagtatttatgaaattaaccgtattaggcgggggcggcgttcgctctgcatttttagcgaaatctctggcctataacgctcaccgcattggtttaacagaagtcgtttttctcgataactctgctgataatctggcgatatttggcgaaattgcccgctatgtatttaataccattcgcccggatattcagtttagtaccaccaccgacccggtcgcagcgctgcaggacgccaactatatcattaccaccctgcgggttggcggcgatgaaagccgcattcgcgacgaacgaattgcgcttgagcataacactctcggccaggagaccaccggcgccggcggtttcgcgatggccatgcgctcgatcccggcgatccttcgctattgccggctgatcgaagaacatgccgccgaagacgctattctgtttaactttaccaacccgtcaggtctggtgacggaagcgattattaagtccggctttaagcgccggatctatgggatctgcgatgccccctccgagctgattcgtgaactgccggcgatccttggctgtgaggagcgcgacctcagcgtggaatgctatgggctgaaccatttctcctggtttacccacttcaccgtccgtggggaagaggtgaccgaacggctgatcgccagcccggaactgtaccagaagacggcgatgcagtacttctccccggagctggtacggctttgcgataatcagctcctcaatgaatatctctattattactactatcgcgacgaggcgctgaaggcgattcagggggccggcgagacgcgcggagagcagatcgcccgcatcaatcaggagatgcgcgaggcactgcgcaccgtggatgccagaacgcaaccggaggccgccttcaccatctggatgcagcattacctacgccgggaaaatagctatatgcagaacgaatcccggcaggagaaattccacacccgcgaaccgctgacgctgcgccagtttatcgaagagccggacaccggcggctatgccggagtggcgctggatatcctggaagcggtgaacagcaccaccactaagcggatcgtggtgtcgatccagaataatggcacgctcgattttttacgcccggacgacgtgatcgagatcagctgcgacctgagcagggatggcctcaaaccggtgacgccggtgaaggtaccgacggcgcagaagaatatgattgcctgcgtgaaggagtatgagcggctggcggtggcggcgatcctgcagcaggataaatcgctggcggtgcgggcgctgatggcgcacccgctgatcggttcctattcgctggcgaaaaccctggtcgaagcctatctcgacgatgagcagttcgccacctggcggtaatccgctgccgatgggattcccccgctcgcaccgcgcttagcgggggctaactattgctacgtagactggtaaaccacatcttcaatagtcgctcaaagcctaagatgcagtagccgaaaaacgggttgctccagtaaatatcatcatcgaacttctgcgggtcgtgaataataaacgccgtatccgcggcctgcgccagcgggctttggtagtcgccggtaaagcagaccagattaatctccttcccctccagggccttaacccagttgagcgccgagctgctgcgcccggatttagaaatgatccagatggagtcgaagcaggcggcgtttttctgttcgaggatttcgtaatcgggccacagcgccaggctggcattcacgccggtgacgagaaacttgttgtaaatatactgggcgatcagctgtgaaaagccgctgccgtggatcaggatgcgctgctggttaaggcttgccagcagcggcgtcagcgcttcttccggctgaacgctcatgtagtcgatatcgttggtgacatcgagcttcggcatggtgatattgaacttgatgaaatagaccagctccagccagccgctgaacttcagtttctttgccagccggaccagggaagaggggttgctgtagcactgttcagccacagcgcgaactccctggcggatacactgctccgggtcgttctgaataaagcgcagcacggtcatttccgttttgcttagcttcacgtcacgaaagatattttctacgtccatggcgggctcctctcagcggcagaatacgctaacaccgttcgacaaccgcgtctgcggcctgagtcaccacaatgaaatgaacgttactttttgtacaaaaatggaataaaaaaaccctctccgcctggcgaaaagggctgctgctgttaacctatttacaacgtaatcgtcagcgtattgccctcggcgctcactaccaccccccattcgctaccggtctgcgtaccgccctgcacgcccgcgacctgcgggatattgcgcagacataacgtccagccgcgggcctcgccttcgccgctcacggcgatggcgttaccctggcgcctggccttcagggtgaagatcgtcgagccgtctgccgccggaacgtcacagcgtgcctcgcgtccatcctcaaggtgaaacagctggaaggcggtgccctcatgccaggcgtaatccggcttctggtcattgttgcccagcgccagcaggctgttgtcgcgaacgtagaccggcaggctcagcgcatcgtgatgctgcttatgccagcggctacccggcaattcatcgttatgccacagatgcgtccagtgcccttccggcagataaaactgcacttcgccggcctcggagaacaccggcgccaccaggaccgaatcgcccagcatatactggcggtcgagatagtcgcaggccggatcgtccggaaactcgagcatcatcgcgcgcagcatcggcgtgccgcactcgttggccagcgccgcctgacgatagagatacggcatcatgcggcatttcagctgtgtgaagtggcgcaccacgtcgcaggactcgtcatcgtaggcccatggcacccgataggatttgctgccgtgcaggcggctgtggctggagagcaggccgaaggcgcaccagcgcttgtagacgtgggccggcgcggtgttttcgaaaccgccgatatcgtgactccagaaaccgaagccggacatgccgatcgacagcccgccgcgcaggctttccgccatcgattcgtagttggcgtagcagtcgccgccccagtgcaccgggaactgctgcgcgcccaccgaggcggagcgggcgaacagcaccgcctcctgctcgccgacggtctctttcagcaccttccacaccagctcgttatagatgaaggcgtagtggttgtgcattttctgcggatcggaaccatcaaaccactggacgtcggtcgggatacgctcgccaaagtcggtcttgaagcaatcgacccccatcgccaccaggccttttagtttgtcagcgtaccactggcgggcttccggattggtgaagtcataaatcgccagccccggctgccacttatcccactgccacagcgaaccgtccggacgcttcagcagataacccttctctttcagctctttgaacaccggcgagcgctgaccgatgtacgggttgatccacacgcagaccttcagccctttcgccttcaggcgcttgatcatcccttccgggtccgggaaagttagcggatcccattcaaaatcgcaccactggaaggccttcatccagaagcagtcgaagtggaagacgtgcagcggcagatggcgctcagccataccgtcgataaagctattcaccgtcgcttcgtcatagttagtggtgaacgaggtcgtcagccacagaccaaacgaccatgccggcggcagcgccgggcggccggtgaactgcgtatagcggttaagcaccgctttcggcgtcgggccgtcgatgacgaagtactcgaggtattcgccttcaacgctgaactggactttagagactttctccgagcccacctcgaaggagacgcgctgcggatggttgaccagcacgccgtagccgcggttggtcagatagaacgggatatttttgtaggattgctcggtgctggtgccgccgtcctcgttccaggtttctaccgtctggccgttgcgcaccagggcggtaaagcgctcgccgaggccgtagacggtttcgccgacgccgaggtcgaggcgctcaaacatgtagttgcgctgggtcttactatcctgcacgtagccgttgttttttagctggctaccggtgatacgcaggccgtcgcgcagaaaatccagcccccagaattcgcctttagtcacccgcacgctgaggctgccgcttttcagctcggcgaacccggccgtattttctatttcgacatggacgtctttctgcacgttcagcggatagtgcgggccgttatccagcgcaccctggaagtgctccatacgcacgccgattatcccttcctgcggcgagaaaaagcgcagggtgaacaatggcgtatccagctgccaggcgcgttcgcggacatcgcgcggcgcggcatagaccaccatttcattcccctgctgctccacctcgtaaacctgtacgggttggatcaggttgagccctggttgaatgagccagtttccatcactgattttcattaaaacgtcctcttagttttgccattctttgtcgatcggggcggcggtgaaatcttgttcgttgcgacgcgcgccctcggccagctcggccatcatttttttcaggaacggcgttttcagcgtgtagtagcgtttggcgatcaccgcgctcagcaggtagcacaccgccggaacgagggtgaacaaggcgataatgatggtgagggtggcgctgttctgggttttagcggcggcgtcatagccgccgccggccagcatccagccgatcagcgcgccgcccagcgccagccctaacttgagcacaaacagggtaccggcgaagctgatgccggtcaggcgtttgccgttacaccattcgccgtagtcgacggtgtcggacatcattacccactggattggcgtcaccagctggtgcagtacgccaatgacgaagataaagacaaacatggtgatttcggcgtccatcggtacgaagaacatcgccacgctgagcaccgccaggagggcgttggtccaccagaagacgctgactttgcatttccagtcggtcagcggtttcgccagcgccgagccaatcaaattgccgacgcagtaggtcgtgaggaaggcggtgaacagcgccgccgagcccatgatccaggtggtgtagtacatcatcgcgccgccgcgaacgcagaccgcgaggatattgaggatggtgagcacgccgaccacccgccactggtcattgcgccagatatcgcgcaggtcttcacgcatcgaggtactgctcggcggcgcttcgacacgctctttggtggtaaagaagcagaaggccagcatcaggaaggcaatcaccgacagcaccgcgatgcccccctggaagccgagcgctttgtcttcgccgccgataaagttgaccagcggcatcatcagcacggtggagagcatgccccccgccgtcgccagcacgaagcgccaggactgcagcgaaatgcgctgcgtcgggttgtcggtgatcacgccgcccagcgcgcagtaagggatattcaccacggtgtagagcagggtcagcagcgtgtaggtcacggcggcgtagatcagcttgccgttgtggcttaaatccggcgagctgtaggccagcacgcagacgaggccgaacgggatagcgccgaagaggatccatgggcggaacttaccccagcggctgcgggtacggtcggcaagcagacccatacacgggtcggaaatcgcgtccagcgcgcgcgccagcaggaacatggtgccgacaaagccggcggggataccaaaaatatcagtgtagaaaaacatcatgtacaacatgacgttatcaaaaataatgtggctggcggcatcacccatgccgtaaccaattttctctttgacggacaaaatgtgatctttcatatgcgcactattcccttagcggcaccgagggttggtaccggttacggtttttgtaaacctttgccgcactaagatgaattgcgatatctcgttatcagattacgtttcttgttttctgtgatcgcggtagggaatcagggagtgaaaaagtgtaactcacggattttgtgaggatttgtccaggactgttctgtaaagtccagttttaacagtaaaaaagtgcgtttaggtatgtggtaaacggctgaaagtagctataatgcgccccgcctccatgtagcaatcgaggcgcggaagatcgtcatctccggtgaggtggctggacttcaaatccagttggggccgccagcggtcccgggcaggttcaactcctgtgatcttccgccagtttgcccctgctcccccacagccactccctaccaacctgagccccccaactcatcatcacagccaatcattttcatccaaaccctgcgttattttgtctctcgcaaacccgttacactggcgcggtggccgcgtgccgttaccaaccgaaacaggagagccataatgacccccgaactcagacactgtttttccattaccatccgggttgataaaccgataatcgtctcccgcagcccgcagaccggtaagcgccagctgatcccgattgtcggcggcagcgtctcgggtcaacttcgcggccacgtattacccggcggcgtcgacagccagataatcgaacccgacggcacctgcaggctgtccgcccgctatgccctgcaggtggcggaaggcacggtctatgtggaaaacaatggcatccgccgggtgccggcccagtatcatgaccagcttttcgccgacgatatgcgcttttttagcgatattccgcctgaagccatctattttcgcaccgtgcccacctttgaggtggatgctcccgcgctcagctggctaaccacctcgctgtttatctgcgccggtggccggacccaggatggggtgatgctcgacttctatcaggtgggctgattttcactttctgcatataactgttattgccgttagcccgtttttcccctcccggcagcggtctacgatggctccatcttttcattcacccgaatcacagaccggagcagttatgaaagctatcgccattactcaagccgccgctgacggcaacaacatcccttctttaaccgagatcgacctgccgatccccaccgcccacgggcgtgatctgctggtcgctgtgaaggctatctcggtcaatccggtagacaccaaagtgcgcgccggctttcagggcgacacgccgcgggtgctgggctgggacgccgttggcgtggtgcagtccgtcggtgaggaagtgacgctgttcgcgcccggggacgaggtctggtacgccggcgcgctgggccgggccggcagcaacagtgaatatcagctggtggatgagcgcctggtggcgcacaaaccgcgcaccctcgataatgcctccgccgccgcgctgccgctgacggcgatcaccgcctgggagctgctgtttcaccgtctcagcgttgaggaaggcggcaatgcgggcgacacgctgctaatcgtcggcgcggcgggcggcgtggggtctatcctgacccagctggccagtaaactgaccgccatgacggtgatcggcaccgcctcgcgtcccgagagccagcagtgggtccgcgaggcgggcgcgcaccatgtgatcgatcacagcaagccgctcgccgacgagctggcgcgcattggtatcacgtcggtaacccatgtcgccagcctgaccaataccgagcagcacttcaacgcgctgatcgacgccctcgccccgcagggcaagctggcgctgattgatgacccggagaccctggacgtggtgccgctgaaagcgaaaagcctgtccctgcactgggaatttatgttcacccgttcaatgtttgagacggatgatatgatcgcccagcatcagctgctcacccgcgtggcggcgctgatcgacaaccacactatcaaaaccacccttggcgaacactacggcgccatcaccgccgccaatctgcagaaagcgcatcgccagctggaaaccggacgcgccgtcggcaagatcgtgctggaggggttttaagatgatatcgcttatcgccgtgctcaaggcgaaaccgggccaaacggacgccctgcgtcaggccctgcaggcgctgctcctgccgacgagacaggagccgggcaacctcgactatgccctgtttcagctgcgcgacgcgccggacaccttctatatgcgcgaggcgtggcagggacaggacgccctcgatgcccatgtcgcgatgccctattttcaggcgtttatgacgcagatggagtctctgctggctgagccgctgcggctggactttctgacgccggttgagccttagcccaccggctgacgaggggtgggaaaatcacgcccctccgccgcgcgggtttaaaagtgggcgggaagcgtgcgggttatcttttccagcaccccgcgatggaccgtaatgtaaccacctttgcgcagctctgccagaatcgacataacacggctgcgcgacaggttggtgcggcgctgtataaagcttaacgcgttaatttggcgacgatattcctccgggtagtccgccaactctgttagcagggttcgcaccatcggataagaatccacccccaccatctcctgcgaacgcatgctcaacaccatcagccgctgcgccagaacatgggccatctcctgccacaggttttgcgcattgaggatctcgaccgcggcctggtgtcctatccagcgtccgcgcaaatctgtctcagcaaacagagagcagtggtgtttttccggaataccgttaaagacgccgtaaccatcgattaatcccaatagcgaaggggcaaatatcgttgatatcaccatgttgttttccgcatggcatagcgaggcaatcccctcttcgagcagaattaatccggattcagcctgggtcggcggaaaacgataataggtcgatcgcggcagcgcaaagggtgagctggcgggcaggaacgcagataacagggattccaccgcgaataacggctttgtctgtcttccgtaataaaaagacggtaacgcctggtcagtagagaggctggctgcagggatcgacatggtttttatgccatcaggtcaggttgaaaaagtgattcgttgagaatcatagtatcaacaggtgaaataacgaataaaagacaagacgttacggggataaaaagagtgtaagcatcattatctgcaataactatttatctctattctacaggaataaataatactatatgccgtaaatacctataaggcttagcggcgataaagataaggccatcttattatttactgcgctggttaacgccgcgcctgagggtttctctaccgctttccccctcgcatctcggccagtccaggctacgcttatcgatgccactgaccacccgcattcccctcccgttctattgagtccattcatcaagaagaggtttcgctatgctgatcaacgctattggtacctactccgccagccagccgctggaatcaatggccatcacccgccgcgacccggggccgcaggatgtacagatcgccatcgcttactgcggcgtctgccactccgatctccaccaggcgcgatcggaatgggcgggaacgctgtatccctgcgtgccggggcatgaaattgtgggtcgggtgaccgcggtcggcaacgccgtctcgcgctacgccgtcggcgatctggtgggcgtcggctgtatggtcgatagctgtcaacagtgcgaagagtgcgctgagggctggaaaactactgcgaccacatggtgctgacctataacgggccgactcaggacgcgccgggacacacgcttggcggttattcacagcagatagtggtcaatgaacgctacgtgctgcggataacccatcccgaagcgcagctggccgccgtcgcgccgctgctgtgcgctgggatcacgacatactcgccgctgcgccactggcacgtcgggccgggtaaaaaagtcggcgtggtcggcatcggcggcctggggcatatggggatcaagttggcccatgccatgggggcccacgtggtggcctttaccacctccgaatccaagcgtaatgcggccagagcgctgggcgccgatgacgtggtggtgtcgcgcaacgacgacgaaatggcggcccacgtcaaaagcttcgacttcatcctcaacaccgtggcggcgccgcacaatctcgatgccttcaccacgctgctgaaacgcgatggcaccatgacgctggttggcgccccggccacgccgcatccgtcgccggaagtgttcaatctgatcttccgccgccggtcaattgccggctcgatgatcggcggtattccggaaactcaggagatgctcgacttctgcgccgaacacggcatcgtcgccgatatcgagctgatccgcggcgatgagatcaacgaagcctgggaaagaatggtcaagggtgacgtgaaataccgcttcgtgatcgacagtgcgaccctcgccggctaagcgccgcgacgaaaggtacgccgccattccgtcgggctgacgccaaagcgcgctttaaactgctggcgccaggtgaccgctgaaagatagcccaccgcctccgccacctgctcgaccggcagatcgcccgcctcaagcagagtctggctgcggcgcagacgttcggcggtcagccagtcggtaatgctcatcccggttgcccgggcgaagtggcgggtcagggtacggcggctcatcgccaccacccgggccagcgaatcgagactgtgcggctcggcaatatgctgctgcagataatccagcaggcagttgattcgcgcatcgcgggtgtttttcggcaccggctgggcgataaactgcgcctggccgccctcgcggtgcggcgaaacaatcatccgccgggcgatctggttggccgcgaggctgccgaaacgctggcggatgatgtagaggcaacagtccagcgccgccgcggtgcccgccgaagtaatgatccgctggtcgtcgacgtacagggcgttgatatccagcagcacctgcggaaaccggcgctggaaatcctgctcgaactcccagtgagtcgccgctcgcctgccgtccagcagcccggcgtagccgaggacgaacgcgccgaggcacaggccgacaatctccgcgccgttatcccgggcccgcaccaggctatcaagcagcgcctgcggcggacgtcgatcgacctcgccccagtaaggcaccaccacgatatccgcctgttccagcgcgtcataatcgccggtggcgtacagcgcaaaaccatcgcgggcgcgcagcagccccggccgctcggcgcaaatgtgcagattaaagcgtttgatttccgaaaccgaatcgccaaacagcatgcaggggacggcgtagtgaaacgggctaaagccctctacagcgacaatcgccacgtcggtgagtttcatcgtcctttccccttgcgcatgttaataaaccacggtttccccatcctgcgggatactcaccacatcggcaatctgattatccagcgcatactggcgcatctcttcccggctcaccagacagtggttgaccgcctcgaggtggatagccatgattttcgcttccggcagggtgaagtgcacgttcaggagatcttccttgcccatgataatcgggccaaagccgatgacgtgggcgtagccggcgttgaggaccaccacgtccgggcgcagcttcagcaggtcggctgcaatgtcatcgcgccagatagtatcccccaccagccacagcgtcttctcctgcggatggcgaaacaccacgccgcaggcctcgcccaggcgttcagccatcgccggcaccgcgtaggtgcggtcgctgccatgctgcccggaggtggttttcagcagacgcacgccggcaaattcgctgtctgccgacagcaggcgcagatcctgaaatccctggctgcgcagcagcgcggcgtcggcctcatgctggacgaacaccggcagggttttcgggatcgcggcgatcgctgccgcgtcccagtgatcgtcatgggtatgggtgacgatcaccgcatcaacgtcgacaattttatcgcgggaaaacggcagctcaaccagcggattgcgcagttcgctgcgcgcggtgcccggaaaacccggccaggcgcctttgtccgccagcatcggatcgatgagaaatcttttcccggcgtagtgaataatctgggtcgcattacggatgtgggtgatgttcatgttggcgttcctctggggtcatctgacgaacatcgtactgagtccccgcctggctcaacaggggcgtttgggcaatgatcgatgaaatcgggccaacctgcggcggttgccatccgcctccggctatgttgttcttaaggctcaatttttgacaggagtggcaggatgaaaaagaaactgaccgccgccgatatgcacgacccgcaggtcatcgccgagacgccgtggttcagcatgcgtaaggtgggtattgatgtcgcccccggcgagcgccgcgacttttattccattcattacccgcgcccggcggtggggattgtggccatccaggatgagaaagtgctgctgattcgccactaccgctacctgatcgataaggtggtgtgggcgatcccctctggcggcgtcgatgaagaggaagacccggcggtcgccgcgctgcgcgagctgcgggaagagaccggctggcaggcgcaacgcgttgaggagatcattcgctttaacccctcctacggcagcagcgatcagctgtttatcacctggctggccaccggtttacgctgggtggggatggatgcagatcaggatgaggtgatggagaccggctggtttaccttcgacgagataaaccaactgatcgcccgcggcgagatgccggacgggctgtcgctggtgccgctgctgcagctgatggcgcagcggcgaagcggctcgcttacggcttaagcatccgccagcggaaccacagctgggccacgaggatcagcacgccgccgataatcttctgcagcggcagctgttcgccgtaccacagcgcggcggcaatgaccgtcagcagcggttcgagcaccatgatgatcgccgcgctggccaccgccgcgtacttctgccccttcatctgcagaccgaagcgcaggctggtggcgatgacaatgctggccaccagccagccgagagtcggcagggtcatcggctggtcccagcgttcaacggcagcggagatggtcaacccgacgataccggtgatcgccagctgcacggtggtcagggggatcagcggtacttcacgcgcgcagcggctggtgtaacagaaccagatcgactgcaccagcgccgtcagcaaaaaccagccctggctggggtggaaggctatcggcatatgcagactgagcagccccaggccaaccaccgcaatcggcaggcactcccaccaggcgcgcggcgggcgcaccttcatcatcacccatgcggtcagcgggacgaacatcatcgacaggctcatgataaacgccccttcgccgagcgacgccgtcgtggagaccgaatagatccacaggcagaggttgagcgcaaaccagagtccgctgatgatgagttttggccagtgctgcttttgcgggcgaaaaccgcggcagaacggcagcagaagcagcgcggcgaagaaaaaacgcagcccaagaaacgcgaacaccggcatgccggcgatcgcctcgcgggaaaatatccagccgcaggcggcaatcaccgtcgcggcaatcagcagcaggtcagcctgccgttggcgtaccatacgcgcctctccctgtgtgttggcttaccagccaggcaccgcgccgccgttgaagatagtctctgccgccttcgccacctccggcgactggtacgactgcataaactccttcacgttttgcgcgtctttattgtcttcccgggtcacgatgatgttcacgtagggcgagtttttatcttcgataaagatgccgtcacgaaccggcgacagcccggtttgctgcaggtaggtggtgctgatgatagccacgtcgactttgggatcgtcgagtacgcgcggcagttgcgccccttccagctccatgatcttcaggttatgcgggttgtcggtgatatccaccgccgtcggcagcaggccggtcccggctttgagggtaatcagctcctctttttgcagcagcagtagcgcccgcccgaggttggtcggatcgttggggatagcgatcgtcgcgccgtctttcagttcggcgactgacttgatcttgcgcgaatagccggccatcgggaagacgaaggtattcccgaccgccaccagatgataattatgcgctttgttgtcctgctcaaggaaaggccgatgctggaagacgttggcgtccagatccccggcgttggtcgactcgttgggcagcagtgagccgctgaaccccaccagctcgacctccagaccgtacttctctttggccaccttcttcgccacttccgccacatcctgctcggcgccgttaatcacaccgaccttaatgtgcttcgcttcattacccttttggtcgcagccgaccagcgccagacccgccagcatcactgcggcggcggcccgtaaacgtaatctcatcctcttcaccctgtctgtcctgaatgtcattgttttttttcgtgcaaaactatagcgactttcgggtcgggtaataaacagcaaaccacgcaactggaaataaaatcatcttcgcgaaacgcgaggcgctagccccgtcgccactcgcccggtgtcacgccatagcgcattttgaagcgcttcgagaaggacgccagcgactgaaagccgcagcgttcggcaatgacctcgaggttggtctgacgctccaggcgcagcagccgggcggccagcgccattcgcaactgcgacagccacgcctgcggcgtcaggtgatagacgcgggcaaaatgacgggcaaaggtggcccgtgataaaaacgcgcgggcggccatactctccagcgtccacggttgctccggggtcgccatcaccgccagcaccgccggcatcaggcgttcatcgctcatcaggcgcagcagcccgccgggcggctgttgctcgccaagcagcatgcgcagcaggagcaccagcagcgtatcgccgaggctgcgcacgatagcgctgccgccgggacgctgcgccaggctctcgcgcaccagtatattaagcagcgcgtccagctccgggcagtcttcacgcgcatcggtatggagatggatcagcgtcgatgcttcactgaacagccagctgacgtgcggaccaaaatagaattcgccgcacagcatctccagcgccccctccgccgggccggcgcgcatttccgtcaccgtgccgttaaaccggtgcgccaccggcagcacctggccccactccaccaggctctccatcagatgcggcgaaccgtgcggcaggaggacgacatctcccgcgcgcaggtgatgggtctggccgccgacgttgagccgcccctcgccgcgcagcaccacgtgccagggcaccacgccgctgcgcatttgctggtgcccggcctgccagcggccgccgaagcgacagtgcaggttcacttcgcagcgcggcgccagcagcgccagcagatgactgagactgtccatgcttctcctgagacgataagacaaaaaggtgagacgaagaccgccagtctagcatgcggcaagcgcctaagatgaccccattgccaacacaccctcgataacaacaggagttaaccatgagccgtttagcagatatccgtgaacaagacgccaccggcaaagccgccgatattttcgccgggatcaaaaaagcgatgggcaaagtgccgaacgcctacctgaccatcggcggccactcgccggcggcgctgcagcaggcgctggcgcacaatgcgatgctccataaaggcagcctcagcgcccaacagctggaggcgattaatctgtcggtcagcgaagccaccggctgtgactactgcctggccgcgcacaccctgatggcgaaaaaagccggcttcagcagcgagcagatccacgccctgcgccgcggggagtatgcggaagagatgcagcttgatgcgctggtgaaattcgcgcagaccctggtgaccaccaccggtacgctgccggaagccgacgtcgccgcgctgcgcaacgccggttttagcgaccagcaggtgattgagattatcagcgccatcagcgccatcctgttcaccaacatggtgaaccgggttaacgacacggtagtcgacttcccgaaagccgattaatccgtcgcgcagcgccggttttacagccccagatcgctgagccccggatgatcgtccgggcggcgcccctgcggccagtggaacaggcgctcgctttcggcgatcggcaggtcgttgatgcaggcgtagcgcgtctgcatcagtccatgcttatcaaactcccagttctcattgccatacgagcgaaaccagttgccgctgtcgtcgcaccactcataggcgaagcgcacggcaatgcgattctcctgccatgcccacagctccttaatcagccggtattgctgctccttgcgccattttcgctgcaggaactcaacaatttgcccccgaccgtggacaaattcgctgcggttgcgccattcgctatccacggtgtaggccagggcgactttttccgcatcgcggctgttccagccatcttccgcggcgcggaccttctggatagcgctgtcgcgggtaaacggcggtaacgggggacgttgttcggtcatgcttactctcctctacgggctaattgctgctgcaggcgctgattctcctgctccaggtcatgaatacgttgctgcaggttctggctgtactccgccacctgctgcgcgctgtagcgcggcgtaatgtgctgcgggcagttccagtcaaacgcctgcaaatgaaaaagaaacagacgttcaatgcgggcgcgatagttggccggcgccacctgcgccagcagctgcgggtggtcctctgccgccaggacctcgacggtggcgtagattttcagcctggcacggcgcggataatccatcaaaaacaggcaggcccggtcgctgccgcgcagattgccggtagtaatgtactggcggttaccgccgaaatcggccatcgccagggtgatgtcatccagcagatgcagaaaccccggcgggccgccgcgatgctgaatgtagggccagccgctctgcgacaccgtcgccagataaaagctgtcgcgggtggcgatcatccccgcttcgctgtcgccgaagcggtcggcctggcggcgactgcgcggcgtttgccacagcgagtcgctgcccatttcatgctgcacatccatcacgtccggggtgatagcgatatcgagaaaggttgctgccatagcgcctcctgttgtctggcgccatcatggactgtactgtgaagaatgataatacgggtaaattggcaatcatctttccgcaaaacgggagaataatggatcgattaaacgcgatggcgctgctggtgaaagtgaccgagctggggagcatgtcggcggcagcgcgggcgctgaatatgccgttgaccaccgtcagccgccatattggcgaactggagagcgcgctgggcgtacgcctgctggcgcgaaccacccgcaaactgacgctcaccgacgccggggtcgattatgtcgccgccgcgcggcggatccttgaggaggtggaaaacgccgaacgccaggcgacgggcgaatatcaggaaccgaagggcgagctggtgatctccgcgccgacgatgtttggacgccagcacgttcttccggtaatcagtgaatttatcgcccgctacccgctaattcgcgtccgtttgctgctcagcgatcgcaatgccgacctggtgagcgaccatgtcgatctggcggtgcggattggcgacctggcggacagcagcatggtggccacccgcctcggcaccatgcggattgtggcctgcgcccatccggcgctgctggcgaaatacggcgagccgcagcggccacgcgatctggcggcgctgccgatcatccgcattgaatcgccgatgccctatcgcggctggcgctttcgcgccgctgagcgcgaggaccagctgattaacctgccgccggtgctatccgtcaccacgccggagagcgccgccgatgccgcgcggctgggggtgggggtggcccgcttactgcattatcaggcgctggatggcctgcgccacggggagctccgtctgctgctggaaaacgtcgagccggatccggcgccggtccatttgctgtataccgctcgggatctggcgccgcttaagctgcgcaaatttatcgattttgccgcaccggcgctgcgtcaggcactgctgcgcatcgccggggccgcttaatgcgtcgcggtcttcagcggcgcctcctttaacagccatgagaggacaaacgccaccgccataatgccggccgccatcagaaacgccgcgtggatcgccgcgccgaaggcgtcgaggtagtcgaggcggatatccgcgggcaggtgctggaccgccaccggattcattcccggcggcagcaccgcgccttccggcagcagttgttgcaggttgctctgcagcacgtgcgtgaacaccgcgccaaacagcgccacgccgatggagccgccaatcgagcggaacagggtcacgccggaggtggcgacgccgtacatctgcgccggcatcgcattctgcaccgccaggaccagcacctgcatcaccagccccagacccgctcccagcacgccggtaaacaggtacagctgccacagcggcgagtgaatggtgatgcgggtcagcagtaccatgccggtcacgccgagcagggtgccgaggatcggaaacaggcgatatttaccggtacggctgataatccgcccgctgataatcgaggtcagcagcaggccgcccatcagcgggattaactgtaacccggcctcggtgggcgtcgcctccttcaccacctgcagatagagcggcaggaaggtgactgacccgaacagcgacatgccgatgacgaagccgatcaggctgcacagcaggaagctgcggttgcggaacagcgccagcggaataatcggctcggcggccatccgttcttcgtaaataaagccgatgatccccacgatgccgaaggccagaatgcaccacagctgcgggtcattccacgcatggacgctgcccccttccgaggtaaacaggatgatgcacagcagcgccatgctgagataaatcgcccccagccagtcaatctgatgctggctgcgtttattgctgctgtggaataccgcgccgatcaccagcagcgcgaacaggccgagcggcaggttgatatagaagatccagcgccaggaggcgtgctgcaccagaaaaccgccgatcagcgggccgatcaccgtcgccaggccgaaaacgccgccgaacagcccctgatagcggccgcggttggcgggcgggatgacgtcggcgaccgccgccatgctgatcaccatcaggccgccgccgccgagcccctgcaggccgcgcatcagcaccagttgggtcatattctgcgccagcccgcagagcgcggagccgacgagaaacagcccaatcgccacctgcagcacgattttgcggccgaacagatcgccaaatttaccgtacagcggcaccgcgatggtggagctgaggatataggcggtgaccacccaggaaagcttgtccagcccgcccagttcgccgacaatcgtcggcagcgcggtggagacaatggtctgatccagcgctgaaagcagcatcaccagcagcaatgcgctgaacagcaggcgtatcgactgcaccggtgggttagcgacttgagaagtcattgcaacgctcgcttgaaattaattaaatgcataattaatatttagtgaaagaatgagtcgggtcaagagatcgccatatcatgacagcacaaaaggatcaggatgctccccgccgcccgggtcggccgcgcggtaaaaaaccgggtaccgccaaccgcgaacagttgatggacatcgccctgacgctgtttgcccgcgacggggcgggccgcgtatcgttgaacgccatcgccaaagaggccggggtgacgccggcgatgctgcattactacttcagctcgcgggatgcgctggtgactcagctgattgaggagcgctttatgccgctgcgcaatcacatcagccgcatctttgtcgatcatctacaggacccggtactggcgctgacgatgatggtcgagacgctggcgcatatggcggagaaaaacgcctggttcgcgccgctgtggatgcaggagatcatcggcgaaatgccgattctgcgccagcatatggatgcccgcttcggcgaggagcgttttcaggtgatgctggggacggtgcgtcgctggcagcaggaaggcaagatcaatccggcgctggcgccggagctgctgtttaccacggtaattagcctggtgctggtgccgttttcgcgcattcacagcgatccgcgtttacaggcggtcaaccgtcagaccatcatcagccacgcgctggcgttaatgggccacggcgttggaggttaaggcgtggttttgacgcttttgtagtccggataagacaccatgggccgccatccgggattttccctgctcgcactgcgcttagcagggctaccactcccgtgttatgtccgggcagattgcgctcccgatatttcttctgcgctatgtctcttatggcgcagggagcgcacagggggcggccagtcgccgccgccccctgtacccccgggctccggccagcaaaatcgccgctacgcggtcccttcgacttatccctgcaggcttcgggtcgggccgaggcagcgtccgtgcaaaacacggccctcagcccgcatccatgcgggctgccccggccttccgggaacgtctcagcgattttgaggccgccagcaccggcagtttcagtcgcgcaagagggtatatcaataacaggccgctcggaacgtaggccggataaggcctttatgccgccatccggcacaaccacaggtgcggtacctgaccgcccggggataccaggatcgttacagcgccttcgacaaatagtggcgctgcatgcctgcgtgcgggaagtcgggcagcgacatctgcagctgatagcctaatttctgataaaacggcagcgcctggaaactaaaggtatccaccagcagatggctgcagccttgcgcctgcgcctgctgttccgcctcctgcatcagctcgctccccagcccgcgcccgcgcgtcgtctcgctaacccacagatactcaatgcacagccagttgcccttgcgtttggcaatcagcccgccctgcattaccccttgcgcatcgcgcgagtaaatccccagatcgccaaactgcgccgcatcgagatactgctgattatactgccgcagaccggcaaacaattcttgttgatcgtcgggattaatgctttttgtaatgattagtgtcattaactatctccagtatcgcgctgccgaatggttattttccctctccactttcacaaaatattcttattttctccatgattatttgccttaattttttgcgttctaaaagtaagcaaaaaaacctttccattatcgcgacggatcgtataatggggaaaaatgagaatgatcattctcaccacaaaaccagaggagatgcgcttttcacctcctgaagaccgaagaggttggcttcagcggagacacaataacaatcacgttcaggaacatctgtgttccttttttgtcattttcgctcacccgaaaatgcttcagcgcccaacctattccctcgtttttaaataaacggggcggacgtcttatatcttgagaaaatataatgaaatacatcatagctcccatcgcgacagcattatttctccttagcggatgcgataatgcgcagacatcagctccgcagcaacccacgccggaagtgggcgtggtcaccctgcaaagccagccggtgccggtagtcagccagctcaccggccgcaccaccgcctcgctcagcgccgaagttcgcccgcaggtgggcggcatcatccagaaacgcctgtttaccgaaggcgatatggtgaaggccgggcaggccctttaccagatcgatccctccagctatcgcgcgacctggaacgaagcggcggcggcgctgaaacaggcccaggcgctggtggtctccgattgccagaaggcccagcgctacgcgtcgctggtcagggataacggcgtttcccgccaggatgccgacgacgccgcctccacctgcgcccaggacaaggccagcgtggaatcgaaaaaagcggcgctggagagcgcgcgcatcaacctgaactggaccaccgtcaccgcgccgattgccgggcgcatcggcatctcgtcggttacgccgggggcgctggtctccgccgatcaggataccgcgctggcgacgatccgcgggctcgacaccatgtatgtcgatctgacgcgatccagcgtcgatctcctgcgtttacgcaagcaaagcctggccagcaacagcgacaccctcagcgtgacgttaaccctggaagatggcagtacctatcccgaaaaagggcgtctggcgctcaccgaagtcgccgtcgatgaatctaccggctcggtaaccctgcgcgctatcttccccaacccgcagcacgtcctgctgccggggatgttcgtccgcgcgcgcatcgatgaaggcatcatgaacgacgcgatcctcgccccgcagcaggggatcacccgcgatgccaaaggcgacgccacggcgctggtggtcgatgccgccaacaaagttgagcagcgtaccgtggaaaccggcgacacctacggcgataaatggctggtgctgagcggcctgaaagcgggcgacaagctgattgtcgaaggcaccggtaaagtggcccccggacagacagtgaaggccgtcgccgtcaacaataacggaggcaacgcctgatgttctcccgtttcttcgtgcgtcgcccggtctttgcctgggtgatcgccattctgattatgctcgccggggtgctggcgatccgcaccctgccggtaggccagtacccggacgtcgccccgccggcggtgaaaatctccgccacctataccggggcgtccgccgaaaccctggagaacagcgtcacccaggtcatcgagcagcagctcaccggcctcgaccatctgctctacttcagctccaccagcagctccgacggctcggtcagcatcaccgtcacctttgagcaggggaccgacccggacaccgcccaggtgcaggtacaaaacaaagtgcagcaggcggaatcgcggctgccgagcgaagtccagcagtccggcgtaacggtggaaaaatcgcagagcagctttctgctgatccttgcggtgtatgacaaaaccaaccgcgccaccagctccgatatctccgactggctggtcagcaatatgcaggacccgctggcgcgcgtggagggcgtcggcagcctgcaggtattcggcgccgaatacgcgatgcgcgtctggatggacccgaccaaactcgcctcctactcgctgatgccttccgacgtccagtcggcgattgaggcgcagaacgtgcaggtttccgccggtaaaatcggcgcgctaccgtcgtccaatgcccagcaattaaccgccaccgtgcgcgcgcagtcccggctgcaaacccctgaccagttcaaagcgatcatcgtgaaaagccaggccgacggctcggtggtgcgcctgagcgatgtcgcgcgggtggaaatgggtagcgaggattacaccgccaccgccaatctgaacggccaccctgccgccgggatcgcggtgatgatggcccccggcgccaacgcgctggacaccgcgacgctggtgaaaagcaaaatcgccgaattccagcgtcagatgccgcagggttacgatattgcctatccgaaggacagcaccgagttcatcaaaatctcggtcgaggacgtgattcagaccctgttcgaagcgattatcctcgtcgtctgcgtgatgtatctgttcctgcagaacttccgcgcgacgctcattccggcggtggcggtgccggtggtgctgcttggcaccttcggcgtgctggccctgttcggctactcgattaacaccctgacgctgttcgccatggtgctggcgatcggcctgctggtggatgacgccatcgtggtggtggagaacgtcgagcgcattatgcgcgacgaagggctccccgctcgcgaagccaccgaaaaatcgatgggcgaaatctccggcgcgctggtggcgattgccctggtgctgtcggcggtgttcctgccgatggccttcttcggcggttcgaccggggtaatctatcgccagttctcggtaaccattatctcggcgatgatgctgtcggtggtggtagcgctgaccctcaccccggcgctgtgcggcgcgctgctcagccactccaaaccgcacaccaaagggttcttcggcgcctttaaccgcctgtgggggcgcacggaggcaggctaccagcaccgcgtactcggcggcctgcgccggggcgcagtgatgatgggcgcttacgcgctgatttgcggggcgatggcgctggcgatgtggaagctgccgggcagcttcctgccggtggaggaccagggggagatcatggtccagtacaccctgcccgccggggcgacggcggtgcgtaccgccgaggtgcgccgccaggtcaccgactggttcctcaccaaagagaaagccaataccgacgtcattttcaccgtcgacggcttcagctttagcggcagcgggcagaacgccgggatggccttcgtgtcgctgaaaaactggtcgcaacgcaaaggggacgacaacaccgcccaggccatcgccctgcgcgccaccaaagagctggggacgatccgcgacgccaccctcttcgccatgaccccgccgtcggtagacggtctcgggcagagcaacggcttcaccttcgaactgatggccagcggcggtaccgaccgtgacagcctgatgaagctgcgcagccagctgctggcggcggccaaccagagcagcgaactgcagtcggtgcgcgctaacgacctgccgcagatgccgcagctgcaggtggatatcgataacaacaaagccgtctcgctggggctgtcgctgagcgacgtgaccgatacgctctccagcgcctggggcggtacctacgtgaatgactttatcgatcgcggccgggtgaagaaggtctatatccagggcgaaagcgacgcgcgcgcggtgccgtcggaccttggcaaatggttcgttcgcggcagcgataacagcatgacgccgttctccgccttcgccaccacccactggcaatacggcccggaaagcctggtgcgctacaacggctccgccgcctttgagatccagggcgaaaacgccgccggcttcagctccggcgcggcgatggacaagatggaaaagctggccgacagcctgccggcgggctccacctgggcgtggagcggcatttcgctgcaggaaaagctggccagcggccaggcgatgagcctgtacgccatctcgattctggtggtgttcctgtgcctggcggcgctgtatgagagctggtcggtgccgttctcggtgatcatggtcatcccgctcggcctgcttggcgcggcgctggcggcgacgctgcgcggcttaagcaacgacgtctacttccaggtggcgctgctgaccaccatcggcctgtcgtcgaaaaacgccatcctgatcgtggagttcgctgaatccgccgtggatgaggggtattcgctctcccgggcggcgatccgcgccgcgcagactcgcctgcgcccgattgtcatgacctcgctggcgtttatcgccggggtgctgccgctggccatcgccaccggcgccggagccaacagccgcgtggcgatcggcaccgggattatcggcggcaccctgacggccaccctgctggcggtgttcttcgtaccgctgttcttcgtgctggtgaagcgtctcttcacccgccaacgtccttctcaggagtaaggtatgtttcgtttaagttttatgtttatcgcgctcctgaccgcgggctgcgtctcgcttgacccgcattatgatcgcccggccgcgccggtgccggccaccctgcccggggcgcacggcgaatcgacggcggtggtcggcgactggcagaaagtggtcaatgacgcgcggctgaaaaaagtggtcagcatcgcgctgaacagcaaccgcgatgtgcaaaaggcgctagccgatatcgaggccgcgcgcgcccagtatggcgaaacgcgggcatcgctgtttcccaccgttgatgccgaactgagccacacccgcagcaaaacggtggccagcggcctgagctccgcttcacaggccgacggcgcggtctccagcttcgaactggacttgttcggcaagaaccagagcctgtcgcgcgcggcgcgcgaaacctggcttgccagcgaattcaccgcgcagaatacccggctgacgatgattgccgatttgaccaccgcctgggtgacgctggcgacggataacagcaatctggcgctggcgcagcagacgatggacagcgcggcaaactcgcgcaacatcgtcgcccaccagatggcggttggcaccgcctccgcgggtgatttaagctcggcggaaagcgtctatcagcaggcgcgcgccagcgtcgccagctatcgcacgctggtggcgcaggataaaaacgccattaacctgctggcgggggaaaccgtgccggagagcctgctgcccggcactctcgagagtctcggggataacagcatcgcgctggtgccggcgggcgtgtcgtcgtcggtgctgctgcgtcggccggacattcaggaagcggagcacaatctgaagagcgccaatgccgatatcggcgcggcgcgggcgaacttcttcccgtcgatttccctgaccgccagcgccggggtcggcagcgactcgctgtcgtcgctattcagccacgggatgcaggtgtggtcgttcgccccctccatcagcctgccgctgttcaccggcggcagcaacctggcgcagctacgctatgcggaagcggagaaaaaggggctgatcgccacctacgagaaatcgattcagagcgcgtttaaggacgttgccgatgcgctggcgcgccgggaaacgctgagcgaagagcttgatgctcagcggcagtatgtcgccgccgagcagacatcgctggatatcgccatgaagagctatcaggccggggtcggcgattatctgtcggtgctcaccgctcagcgcacgctgtggtcggcgaaaacgacgctgctgtccctgcagcagaccgacctcaataaccggatcaccctctggcagtcgctgggcggcggcgccagttaaacttacccgccgggcgaccgagcccggcctctacaaggaatcgttatggcacgtgtttccctctcctgggcgctgatcctcggcctgctgtcgggtatcggcccgctgtgcacggatttttatctaccggcgctgccggagatcactcagcagctgcaggccaccagcacccagacccagctgtcgttgaccgccgcgctgattggtctcggcctgggtcagctgtttttcggcccgctgagcgaccgcattggccgcctgaaaccgctggcgctgtcgctgctgctgtttatcttctcttcggcgatgtgcgccctgacccgcgatatcaacatgctgattgtctggcgctttttacaaggctttgccggcgccggcggctcggtgctgtcgcgatccatcgcccgcgataaataccagggcaccctgctgacccagtttttcgccctgctgatgaccgtgaacggcattgcgccggtgctgtccccggtgctgggcggctacgtcatcaccgccttcgactggcgaattctcttctggacgatggccgccattggcggcgtgctgctggtgatgagcctggcgatcctgcgggaaacgcgcccggccacagcggcgcatgccagccgccaacggcccggccagccggtgctgaaaaatcgccgctttctgcgcttctgcctgatccaggcctttatgatggccgggctgttctcctacatcggctcttcttccttcgtgatgcagagcgaatacggtatgagcgccatgcagttcagtctgctgttcggtctgaacggtatcgggctgatcatcgccgcgatgttcttttcccgtctggcgcgccgctttagcgccgaaagcctgctgcgcggcggcctgacgctggccgtgagctgtgcggcgatcatgctgctgtttgcctggctgcatctgccggtgctggcgctggtcggcctgttctttaccgtgtcgctgatgagcggcatcagcaccgtcgccggcgcggaggcgatgagcgccgtcgacgccgcgcagtccgggaccgcgtccgcgctgatgggcaccctgatgtttgtcttcggcggcatcgccgcgccgctggcgggtctcggcggcgaaacgatgctgaaaatgagcctcgcgatggccatctgctacctgctggcgctgctgctgggcctcagcaaaccgcgcgacgcacgctaatctcctgctgcggtaataaaatattccagatttattaccgcactatttcccgccatatctaccattctcgtattattctccacgtactaatcgtgatactcttcacaggcaaggaataaataattccttatactgcgcgccactgagaataacgaggtttctatgagtatcgacctgagcaaactgctgaccgagcgacgtaacgccaacagcgccaacattgacaccctctccaccctcgagatgctgacggtgataaaccaggaagaccagcaggtagcccaggcgataacgccctatctgccgcagattgccgaggtggtggataaggtcgcggcggcgctgcaggccggtggccgcttgatttacattggcgcgggtacctcagggcgtctggggatcctcgatgccagcgaatgcccgccaaccttcggcacccgcccggagcaggtggtggggatcatcgccggcggacataaagcgattctcagcgccgtggaaaatgtggaagacaacaaagcgcagggggcgatggatctgcagaacctgaacttcagcaaccgcgatgtgctggtggggctggcggccagcggacgcacgccgtacgtcattggcgccatggaatacgcccatagtcagaatgcctttgtcgccatcgtcagctgtaacccgcatggcgaaatggcccagctggcggacgtggcgatcaccccggtggtcggcccggaagtggtcactggctctacccgcctgaaagccggcaccgcgcagaagctggtgctgaacatgatctccaccggggcgatgatccgcgtcggcaaggtgtacagcaacctgatggtcgacgtcgaagcgaccaacgccaagctgattgagcgccaggtctctatcgtgatggaggccaccgactgcgatcgcgccaccgcccagaaggcgctggaggcctgcggccgccactgtaaaacggcgatagtgatggtgctggcggacttaagcgccgcagaggcgcagtcgctgctggcgaaaaacaacggctatatccgcaaggcactcagcaacacctgagcgccgacagacaggtaacgggcaatggcaaaaataacgaaagagatgatagcgcggatcctcgcccacgtgggcggcgccgcaaacgtcgcgcaggcgggcaactgcatgacgcgcctgcgcttgaccctgcgcgatgaaagtctggccgacagcgccgccatccgccagattgacggcgtgatgggggtgatcgtcagcgacgagcagttccaggtggtgctcggccccggcaaggcgcaaaccgccgccgaaatgatgaacggcctgctggaggcggcgcccgccgccgcgccgacgctggccgacgtcgcggcggagaaaaagcaggcgctgaagggcaagcagaccagcgcggtgcagaagtttctcgccaaattcgccaccatctttacgccgctgatccccggctttatcgccgtcgggctgctgctgggcttcgccaccctggcggaacaggttttcgtgctggagaacgcccatccgaacgccagcctggtggcgctgattggctatatgaaggtcttcagcaaagggatgttcacctttctgagtatcctgatcggctataacgcgcagaaggcgttcggcggctccggcgtgaacggcgcgattatcgcctcgctgttcgtgctgggctacaacccggaggcaaccagcggcttctacgccggcatttccaccttcttcggccatggcatcgatccgcgcggcaatatcatcggcgtactgatcgccgctatccttggcgcgtgggttgaacgccaggtgcggcgggtgatgccggccaacctcgatatgatcctcacttcggcggtgacgctgctgatcatgggcgcggtgacctttacggtgatcatgccgattggcggctggttgtttaccggcatgtcatggctgttcctgcatcttaacggcaacccgtttggctcggcggtgctggccggcctgttcctgctggcggtgatgttcggcgtccatcaggggtttgtcccggtctattttgcgctggtggacgcccagggctttaactcgctgttcccgatcctggcgatggccggggccgggcaggtgggggcggcgctggcgctgttctggcgggcgaagcgcgattcgctgctgcgaacccagattaaaggggcgattattccgggcttcctcgggattggcgagccgctgatctacggcgtcaccctgccgcggatgaagccgtttgtcaccgcctgcctcggcggcgcctgcggcgggttcttcgtcggactgatcgcctggctggggctgccggtcggcctgaacacggtgttcggtccgtccggtctggtggcgctgccgctgatgacctccggcagcggaatttacgccgggatggcggtctacgccggcgggctggcggtctcctacctgtgcggttttgtcctcacctggctgttcggcagtaaaaatgtcgatttaagctagaacgcgactatcggttaatgcccggcggcggcttcgccttaccgggcctgcaaaatagttacgccgccgcgcccgactaccatttcctgccccgccgcccgggcgcgcgcatgctatgattcccctttgtcatatttcgcttgaggaaaagatgggctccagcaaaaaagggatgctgaacgtactgattgccgccgtgctgtggggcagttccggggtgtgtgcgcaatttattatgcaggaaagccagatgtcgtcgccgtttctgaccatgacgcgtctgctgttcgccgggctgatcctgctgatgctcggctttgttcacggcgaccgcattttccgcgtgctgcaaaaccgccgcgacgccctaagcctgctgtttttctcgctgtttggcgcgctaaccgtgcagttcacctttctgatgaccattgaaaaatccaatgccgccacggccacggtgctgcagtttctgtcgccgacgatcatcgtcgcctggttcgccctcgcccgcaaagcgcgtcccacaccgctggtgctgggagctatctgcacctcgctggcgggcacctttctgctggtgacccacggcaacccaacgacgctgtcgatttcgccggcggcgctgttctgggggatcgcctcggcgtttgccgccgcgttttataccacctatccttcaacgctgattgcccgctacgggacgctgcccatcgtcggctggagcatgctgttcggcggcgcgatgctattgccgttttacggcggccagggcaccgattttgtggttaacggcagcctgctgttagcttttttctacctggtggtgatcggtacttcgctgaccttcagcctctatctcaacggcgcgcagaagattggcggcgcaaaggccgggatcctcagctgcgccgaaccgctgagcagcgccctgctgtcgctcctgctgctggggatcaccttcacgctgccggactggctgggcactctgctgatcctcgcgtcggtggtgctgatcgccatcgactcgcggcggcgggtgagagccgcctgagcaggcgataaaaagcgcattttcaataagttaaactgaccactatttgcgtgttttcccgcctgcgcatatagttgacggaagcgattacggaaggagaagcctgatgaaagcatgttggatggtatgcctggtcaccgccctgagcgccacgtcggcgtgggccgaatcaccgctgcaaagcctgcagttcgagcagcaaaaacagcaggtgctcaaagcggtgaaggaaaaatgcgcgccagcaagccacctcagcgacaacgattttgccaataaagtgctggcgaccgacggtaacaagaacgcggtccgcgaagcaacgctggcgaaggagcgcaataaccagaaaagctaccaggccgcaatcgacaaaatcgtctgtccggccaaatagcggttatttcagcctcgcgaccagcgttttccagtcaaacggcgtaagctgcctgtagctcaggctacgggcggccatctgctccggcagctggcgctggcttttcgcgatcgcctcgctcattatcccggcgctccccacgtcacgcagggttttcaccacctcctccatctcttcgctgcgccgaatgccatgttccgccacccggctgatcagatagtcggggaacgcgcctgtccagcccagagaggggaaactatgatgcaaggagctaagcacctcctcctcaacgccgtattcacgagccgcgaacaggcattctgtggtaagcgcttcaagacctttgatcatcacgctacggcacatttttatcgccgacacctggcccaccgtactggcgccatagcgggcattcagccccagcctctgcagacgcggcgcgatcgcctccgcctgcggcccgccgatcaataacggtgtctgcaatcgggccggcggtaccggcgccatcaccgcgacatcaatgtaggcgcccggcagaaaatgttcagccgcctgccgtttcgtctccggcgccacggagttgagatcgaggaaatattgtcccggctgcagcagcgcggccgcctgctgcgccacctttagcgcctcaccggcggtcacagtagaaaaaaccagcgtggccccctccagcgcctgcgccagcgaatttcccacctgaacgcgcgaatcacgggctttactgagcattgcctctcgctccgggccattgagcttgcaatcccaaatggtcaccgcatgctcacgggccagatccgccgccagaatgccacccgcctcgccaaaaccaataaacgcgattgtcatcatcactcctcacgcggccagacgcgggccggaataaaaacctctccagcaaacagcagtcgcgctgtgcgtaacaggccgcagccagccagggcgccgtcagcatcaagctgaagcgtcacgctaaattcgcctgtcggatgctcgacgctgagcagcggcgtatcgcctggcgctacctgcgccaggccctgcgcgacagagccggggagcagacaagcgctggccacgctcaccgcgccaaatacgccgatcgacgcgtggcagcggtgggggataaaggtgcggctgctgatggcgccaccgtgtcgcggctcggcgatcagggtcatcttgggcaccgtgcgctggctgacgtcgccaagctgcatcagcggcccggcctgcaggcgaatcgactccaggcgacgtttaagcgcgtcgtcattatccagctgttcgcgcgtctcatagccggtgcaaccgaggtcgcaagcgcgcagcaggatcaccggcattccgttatcgatgcaggtcacctcgacgccgtcaaaacggtcacgaacccggccggtcggcagcagggccccgcagctggagccggcgacatcaagaaaatggagcaggatcgggctggcgctgcccggcacgccatcgatacgactctcgccgacgtagttgaccccgtcggcatcgcaggggatctctgccaccgccagttgccccgtgttctccataaaaatacgcacccgagtgagcggcgcatcgtggcgaaccagaccgcgctcgatggcgaaagggccaacggcggcgagaatattgccgcagttttggccgtaatccacggtagccgccgccacgttcacctgggcaaacagatagtccacatcggcgtcaggccgtgcggagcggcggataatcgccactttgctggtcagcggatcggcgccgccgatcccgtcaatttgccggggatcaggcgagcccatcaccgccagcagcaccgcatcacgtcgcaccggatcggcaggcagatcgtcggccagaaaacaggccgctttagaggtgccgccgcgcatccatagacaggggattccgcgttgcgccatttattcctccacctcgtctgcgcggtcgtaataccgcaggcccttttccgccagacgcggacgcatagcgtaaatatccagccccaactcgccattgcgcatccgctcacgtttcgcaagctcattgctcatgcgggcttccgctttatggagcacatcacggacccgggcgtgaggcagcaccacgacgccatcgtcgtcggccaccacgacatcgcccggctgtacaagctgacctgcgcatatcaccgggacgttaaccgaaccgaggctctctttcaccgtcccctgggcataaacctggcgggaccagacggcgaatcccatttcccgcaacgtttgcgaatcacgaatgccgatatcgcccaccagcccgaccacgccgcgcgattggagagacgtcgccagtagatcgccgaagaagccatcgccgcacggcgaggtcggggccaccaccagaatatcgccggcgcggcactgctcgaccgccacatgaaacatccagttgtcgccaggcgtcaccagcacggttaccgcgttgcccgcccggctaacgccctgctgaatcggacggattgccggccccatcagcccctgacgatcccaggcttcatggagcgtcgccaccccggccgcctcacagcggcgcaaaaccgcctcgtcatggcgcggcaggtggcggatcacaaggccttttttatttaacaggttcatgccaggttctccgttacgcgggggaagatgctctggaaggcttcgccgtgaacgatatcgcgcgcggccgtgatgccgatattgcgcttggcctgcaccccgcgctgcagcgccacgcgggtgtagtattcccacagatgctcctgaccctgcatgcactgaatggcctgatactttttctcccagacggcggtgatgtccagtaacacatcgggtttccagttgcactgctccggctggtgcggttcgaaacagtaaaccgggggagcagcgacaattttctcgccagggcgatagccttctgcctgggcgataatccgtgcttcctgcgccagatgggaggccagcggatgatcgtagttatagggatcctgcagggagtgcgtcaggacaaagtggggctggatacggcgatacacatccgccagacgaaatagcgtctctttatcggcgcgcagcggatagtcgccgatatcaaagaattcgacgctggcgcccaggatcgcggcggcggcctgcgcctcttcgcaacgcacctgcttcaccgcctcctcggtcatgttgcctttacgccacagtttggcggactcgccgcgctcgccaaaggataaacagaccacatggacctgatagccctgcagggcatgcagcgctatcgcaccgcccgcgcgccagacgaaatcggccgagtgggcgctgacgacaagggcacttttttcgctaaccggatgagacatgatggcttcctctgttgtttttttcagcttgtcatgtcccgtcgtggggaggtaattcgttaacttgcgaaggctatgatttttatttatgttgtcgtctcactcactttttcaggcctgacgaacaatgctaaagagaaagcacgataaaattataaatatcatgcagctgcgctttttctgtcaggtcgcgctgcgcggtagcgtctcacgcgcggccgatgacttattccgcacgcagtcagcgataacccgggctattcgcgatcttgaagccgcgttgaacgtcacgctgttcgaacgccattacagcggcatggtgcccaccgagtatggcaagtgcatcctgccgcgcgcccggcgggcgattgacgacctgcaggccatcccggcgctgctgcagaagcaccatacccgcagcagcggcccgctggcggacgccggctggctgttcaatacccgccgcttagccatttttattcagctctatcacgtcaaccatacccaaaccgtcgcgcaacagttggggatcactcagccggcggtcagtgccgcgctgaaggtcctggaaaaaggagcggattcggcgctatttcgccggacgccagagggggtgcgtcccacgcctgccgcggagctactctatcccccggtgagcagagcgctcaacgagctggaaaacatctggagcgatctcgctgcccgtcgcggggtgctggagggcaccgtgcgcattggcgccctgccgctgagccggacccggctactgccctccgccatcgccgcctttctggcccagcacccgggcatcaccctcatgaccaatgaaagcccgtatgagtcgctggtcgccgatatgcgggcaggtaatatcgattttattatcggcgccctgcgccaggatgaagatctcccggacctctgtagcgaagcgttattcgaagaggatatgttgattttactgcgtaataaccacccgctgctgcgccatccggacccgcgcagccagctggcgacagcgcaatgggtgctgccgcgcgccaacgcgccggcgcgcaatttgctggataaggcgtttgtcaccctggggctgccgctgccccagccgacggtggagaccggggatgcggcgatggtgcgaggattgctgcagggctccgacatgctggcggcggtctccgccagccagatgcgttttgaaactgacaatgggctgctcagcgtgttgccggttcccctgcccgataccacccggcgtatcgggctgacgtttcgcgccggcagcctgccctccccggcgacgcaggcgctgttgcgttttatttatcagcaggttcaggacggggccgtttaacgtttacccgccaccgaataggttacctgctggttgcgcgtttgctgaaacgcctccagcgtctgcccgcgcatcgcggcgtaaatatgcaggttggatacgccgaccaccgcgcccattttctccagcaggaagaagctggcgccatactgaattaatccccgccagtcgcgcgcgttgagcaactgctgttcctcctcactcagtccggcttcggcataaagcgactgaggcgactgcagaaaacgttcgcgccaggcaggctcaatcagccgatgcaggaaacggttaagccgcaagccattcaggctgcgctcgtgggtaaaaggataggttcccggcagtttctccaccccggccagctgctgcgccatatgctggcgatggcgcgtcagggtatcgacggggggcaggcgcgcattgttctcaaggatcagcgtggcgataccggtcatcgacggcaggtaatagtcgcgccaggtttcggtgacattggctgatagcgcgccgcgcatcaccagccacatgatcacttcggacccctccatcccccccagctcggcatattcgccaagggtcatttcggtaagcttttccgggtcattaaccagcatatcaacaaactgggcatcccagtcgggattattaaatccgcagcgctcgccatgaacctgatgcgagagcccgccggttgcgacaatcgccacattgatatcttccgggaagctttcaatcgcccggcgcagcgcctggccgagtttgtaacaacggcgcgcgcttggtaccggaaattgcagcacgccgatctgtaacgggatcaccgccgtcggccacccctgcgcttcatcccagggcaacagcgccgaaagcggcgagaaaaggccgtggtcgagctttttatccataaagaacgacatatcaaactcgtcggccatcaggctggcgccaatgtgccttgagagcgccgcgttgccctggaccggcggcagacagcgcggtccgccgccctcatcggcaacgtcatattgactgtcgattcccagcgtaaaagtcgaatagtgatcgaagaaaaaggcggtcacatggtcattaaagatgtacaccagcgcatccggttttttctcctccagccagcgctgcagcggttcgaagctctggaagatcggcgcccacgccggatcctgctgtttatgatgatcgaccgcgaagccgatagtcggggtatgagagacggcgataccgccgagaatgttagccatcagataactccacttatcggtgttcgaggggggatgacaaagcgtcaagttctgcctctgtgagtcgaggcttagcgtgattcatacggtgcaacaaaatacagatccccgccaggcaggccggcagcgcaagcaccaaaaagatcgacgagtgtcccggcactgccagcatcagcatcccgcccagcgtggagctgaggatagccccggtacggccgataccatgcatccagctgacgccggtagcgcggatctcggtttgataataggcgggcgaataggcctgcagaccgttctgcgcgccgttaatgcacatcccgctgataaaaatcagcaccgacagcgccgccgaaccgaaatccatcaccccctgggacaacaggcacaaacagccgaggaaataggttgccgcaatcacggctttcgccgaagcgcgatccatcagcataccgacaaggatcccgcccagcgggccgccgagctggaacaagccggtcatcatcgccgcctgctgcagcgacagcccgccggagcggagaatggttggcagccagccgttcagcaggtaaatcacgaacagccccataaaataggttaaccacagcgctattgtgccgcgggcatagccatgccggaacagctgcgccactttgctgctccgcgtgatgggcggcgcattcagctggaaaacggtttcagccgtaaactggcccccaagccggttaagcgccctggcgatctgctcgcccggtagtcggcgcgccaccatgttcatcgccgactctggcaacatcacgatcataaaggggagcaccacgagcggcagcacgccgccaaaaaccagcgccgagtgccagctgtaatgcgataacaaaccggcggcgataaagccgccgaggccggaacccacgttaaaaccgctgtacatcagggtgatcatcacccctttacgccgctccggcatatattccgccaccagcgtgacgcagttgggcattacggcgccaaggccaaggccggtgagaaaacgcatcagcgccagctgcgtcgggctttgcgccacggcgccggccaggctgaacagcgcaaacagcgccaccgaccagagtaaaattcgctttcggccgtagcggtcagaaagcggacccgctaccagggcgccaatggcgacgccgaacatggccgccccaagaatcggccccatttcggcccggctgatgccccagtcttcgatgagcgccggggcgacaaagcccatcaccgcggcgtcatacccatccagcataatgatgatgaaacagagcagcagcacgttccattgaaagcgcgagaccgggcgggtatctatccacgctttcacatcgacaacgttcgtgtgattcatagggtgacttcctcaagcaggcggtacgaatgttctggttagtgttttttgagtggaactttcgtactcaacttaaggcaggtcacgcaggctgtccggttcgaaaatccggcgtcagatatgagttttatttataatgtgagggatacgacaaaaaccagccagcaaaaaacccgcagccaacggcggcgggtcagggcaagagcagcgtttagtgcttcggaataattaaatcgccgcgcagcgggctgccgcccgggttgtccgttttctcggtcagccagttgacgatccgcgacgccatcgcgtccatggaatattcaatcgccgggatagtcgggataccgggcagctgtaacgatccggcgaggctaaacaccatgacattttgcggaacggcgcggttaaacgcctgcagctgcggcaccacgcgctgcgcctgctgttcatcgctcaccagcagcgcgttaaagttcagcgtcgtggcgttattgaccagctcctgcaccgccaccgacggcgaggtattatccagaaacaccaggttgcgattaaacggcaaaaagtttttttccagcgcgtgcttgtagcccagcagcacctggtcggcaaagccgctgctctgcggatgaatcagcgcaatctgccgtctcccctggctaatcagatagtgacaggcggtttcggcggcgaaagcatgatcgaactgaatactgttgtcgccttcgctatcgaggcagtccaccagtaccacgtccgggcggttaatattcagaggaaaacgcgcgccgatgattagcacgttatcgcacagcccgcaggtcaactcctccagagagttcatcacgccgtggctggtgttggcgaagcgcagcagcaggtgtttctggtgctggctgagctgtttttccagggcgtagagatagctggtggtttggttgatgttgtcctgggcgcagatgacgccgatgcagccggtggactggctgagcaacgactgggctatcatgtttggccggtaattgagcgcttccgccgcctgcagcaccgcctgacgactggcttccttcacgccacgtgagccgctcaacactcgcgacaccgtggctttggaaaccccggcaagtcgtgaaacatcattgattgtcgacatcattttcccctgcgcgggcgccgcgtcccgccaaaatcctgtaaacctgaatcgcttcaattatgaccagcgcagtatatccatttcgccatttgtttggaaaccgattttccatttcagcgcaaaacatcgccaaatcgacagaataatgtgagcgaaatccaataaatccgccctataagcaggagatcttgaccactatcacagttctgctttttataaatggaaaccggtttccgtctgatatcaaatcacccacgcaataactttttacattttgaggatggtcgtcgatgtacaagattatgctgtgctgctctgccgggatgtccaccagtctgctggtcagaaagatggttgaggcggcgaatgaacgtgacctgccggtgcagattgacgcctatggcgtttccgaatttgacatgcagtttccgcagtatcaggtggtgttgcttggcccccaggtgaaatacatgttgaaaaccctgtctgacaaagcggcttccctgaacattcccgttcagcccatcgatacgatggactacggtatgcagcggggagacaacgtcctgaattatgctctgtcgctgatcccagcggcgcactgagaggtgttgaaatgagttctctgtatcagtccatgattgccgtgatcgagcaatctattactccgctggcaggacgccttgggcagcagaaatacgttatcgctatccgcgatggcttcactgccgccttgccgtttatgatcatcggctctttcatgctggtatttatctttccgccgttttcacccgataccaccaacggctttgcccgcggctggcttgatttctcccagcactaccgcgaacagctgatgctgccgtttaacctcagcatgggcgtgatgaccttctttatctcggtcggcattggcgccagcctcggtcgtcagtttcagctcgatccggtgatgtccggtctgctggcgtttatggctttcctgctggtcgccgcgccctatgccgatggcaaaatttccactcagtatctgtccggtcagggcattttcaccgcgctgatcaccgccatctactccacccgcgtttacgcgtggctgaagcaaaacaacattacgattcgtctgccgaaagaggtccccaccggcgtcgcccgttcgtttgaaatcctgatcccggtgctggtggttattgcgactctgcatccgctgaatctgtttatcgaagcgcagaccgggatgatcctgccgcaggcgatcatgcatctgctggagccgctggtttccgcctccgactcgctgccggcgattttgctctctgttctgatgtgccagattttctggttcgccggtatccacggctcgctgattgttaccggcattatgaacccgttctggatggccaacctgtcggcaaaccaggcggcgctggcggctggcacggtactgccgcacgtctacctgcagggcttctgggatcactatctgctgattggcggcgtcggttctaccctgccgctggccttcctgctgctgcgtagccgggccacccatctgcgcaccatcggcaagatgggcatcgtgccgagcttctttaatatcaacgagccgattctgttcggggcgccgatcatcatgaacccgatgatgtttatccccttcgtctgcgtaccgatggtcaacgcggtgctggcttacggcgcgacgcgtcttggctggctgagccaggtggtgtcgctgacgccgtggactacgccggccccaattggcgcgtcgtgggcggctaactggaccctgagcccggtggtgatgtgtctcatctgcatggtgatgtcggcggtcatttacctgccgttcctgcgcgcttatgaacgttccttaatgaaaaccgaagttgagaaagccaaaaatagcgttccggtagcagaaaccgttagctaatccctctccttccggagagataataagatgacagcgtaataatgcagaaaatggactttcactgcattattaaataataaatacctcaggaatacacatgattgaattagaagatgcggtaatggaaattatcgttaatgcgggacagtcacgctcattatgttttgaagcgctgcatgcggcccgaaccggaaatatcgacgaagcgcgcttactcttaaacgaggccgacggctacgcccgccgggcgcatcagatgcagacccagctcatcgggcaggatgccggtgaagcgcgtcagcccatgacgctgattatggtacatgcccaggatcatttgatgaattcgctgctggcccgcgagttctcagaagaattaatccatctgtaccagcgttaattaatatggaataacgttagcgagaatattattctccgacgtcgctgtaccctaaaaaacaaatcagcttattttggctatttattctagccagaatgggatggttattatctgaaatatattaattattaaagcgagataaccatgaatactgtaaaaaaactgcctttagccatggcggtggtcgccgcgctgtgcccaatttctgtcatggcgcaagaatttacgcaggaacagatcgacgccatcgtcgccaaagccgttgataaagcgctggccgaccgccaggcgaaaatcgacgccgcggccgacaaaaaggtcgacgtgatcaccaacccgcagaccaccgccgcctcgccggatatggccattccgttcggcctcaagttcagcggctatgcccgctatggcgctcacttccagaccggcgaccagaaatatgtcggcgtcgacggctcctataacggcgcctcggcgatcggccgtctgggcaacgaaagcaacggcggcgaattccagatcagcaaggccttcaaaagcgcgcagggggctatctgggatctcaacgtgatgttcgaccactggagcgacgaagttaacctgaagaaggcctacgtcggggtcaccaacgtgctggaatccaaccccaacgcctatatctgggccggccgcgacttccaccagcgtccgcaacaggggatcaacgactacttctggatgaaccacgacggccagggcgccggggtaaagaactttgatatcggcggcgtgcagttcgacgtggcggcggtctcgcaggtgaaatcctgcagcccggaagtgatggccgacgagaccaacccgtcgcgcatcacctgtaccggcagctccgacaccggcgacaacggccactacgcgctgaccaccaaaacccacaacatcaaggccgggccgatcgacgtcgaggtgtacgccaactacggctttgactcaaaggcggtggacagcgacgcgcgtctcgaagcctggcagggcggcctggtgctgagccacaccaacgacagcggggtgaacaaggtgatcctgcgctattccgacaactcggataacagcgtctacaacaagaccgacgacctgaccacggtctacgccagcttcgagggcagccataagttcacccagcaggcgcaggtggaatatctgctggccttccatgactacgacaacggcaaagataataccgacaaccgcaaaaactacggcgccatcgtgcggccgatgtacttctggaacgacgtgcactccacctggctggaagcgggctaccagcgcgtggattacgaccagggcggggataaccacggctggaagctgacgctgtcgcagaacatcgccatcggcatggggccggagttccgtccgatgctgcgcttctacgtgaccggcggccaggtggacaacgagcacaccgcgaaggtgaacggcacccaggaccagcagctggattcgctgaacgtcggcgggatgtttgaggcgtggttctgatgcgatagcgttgccgaaggagcgttcccggctggcgctacgcttagccgggctacaactggtgcgctccatttatgccggatggcggcatacatgccttatccggcctacagaaaatcgccttccccccaggaccggcaagcgcagcgccgccgggcagtcagacccgagccctggtggcgtcatcaattctttatctctggcttaatcggcgggcgatacgctcaagcttcatcatcaacagcagcgtgacgcccaccagcacaatggtcagcgccgagccatcggcgatattgccgcgatcggtgaggctgaaaatggtcaccggcagcgtcgtccagcccggcggatagatcatcaccgtcgcccctagctctcccatcgacaacgacaggctcagcgccagcgctgaaatcatccacggcgtcatcagcggcagcgtcacatggcgcaggcgataccacggcgaagcgcccaggctggaggcgacgttttcaatatcagcggaaatacgcgccagcccggtcgttacgttgctgaaggtaaaggccgagatcagcacgaagtgcgccgccagaacgataaagaaggtgccgttcatctgcagcggcccctggctaaacgccaccagaatgcccagcccgacggaaaccgaggggatggcgctgggcagataaaacgccaggccaagatatttctgtagcgtcgcgccatactggcgcagcgccagcgccgcccacatcccgcacagcagcgccaacaggctggcgcagaagcccaccatcaggctcgaaaacagcgaatcccacgccgcgccgcgaaaggcgttaacaaagtgggcaaaggtaaagccggtgggcagcaggccgttccattgtttactcaggctggagagtaaaatcaccgccagcggcagcaggaaaacgccggcaaaaagcgtcaccgccagcgcgcccgccgccgcgcggcctttacgcgaccaaatcaacatcgttaactccttacgccagtgcgcgccgccgccagccgatagagcataaacagccccagcgacagcagaatattgatcagcgcaatcatgcaggccacgctgtaatccgactccagaatcgccttgctgtagaccatcatcggcagggtattgacccctttggcgccaataaacagcacgatcccgaactcgttagtggtcaatagcaggcacaggctgccgcccgccatcagcgccgggagcgccgccgggaagataacctgggtaatcacccgtaacggatgagcgccgagaatactcgccgcttccagctggctcttatctatctgccgcagtcccgccatcaacggacgcatcaccagcggcgtaaagacggtaatctccgccagaatcacgccgttaatcgaatagaggaagtctaccggcggcagttcaaaagcaaacagcgccatcagggtgccgttgagcagccccgccgagccgtaaataaaggtgaatgcgagagtgataagaaaggtcggcagcgcaataaaagtatcaatgacccggcccaccagttggctgccggggaacggaataaacaccagaatcagcgccagcacgctgccgagcaccagacagccaagggtggcgaacaccgcaatctgtaaggtattgagcagcgcgccaataaagcgttttgagtcaatcacctgccagaaggtctcgaggctcaggttgccgctggcgtcgcgcagcgcctgttcggcgatcagcagtagcggatagaaaaacagcgtcgccagcaccagcagcggcaatgccagccacaggtaaggccgtaagtttcgcgccggacgcgcaagcgtgagggtttgcgccatcattgcacctcgatcagaaccgcatcgccaggttcgaagtagagcgccagcttgtcccccgcgcgcggcagcgggttcacgtgggtcatcacaatccgcaccgcttcgccggcaacatcgcacagcagatgcgtcagatcgccctgccagtgtaccgaggtcagggtagcattgagacgattactggttgccgatcgcggcgccaggctcatgtgctgcgggcgaatgcataacagcttgttgttgccatgcaggccgccccggctgaaggcgttaatcaggccgccgccgcagctcacgctaaccagccccggctcggggctgtctttcagcgccgtcgcctgcaggatattggcgcggccgaggaattcggcgctaaagcggttcggcggatagtggtacagctcgtgcgtttcaccgtgggcgatcagcgacccgtctttcatgatgccgattttgtccgccagggtcagcgcttcggtctgatcgtgggtgacgtagagaatggtcagttccggcagttcgcgatgcagacgggcaatctcttccaccatgttatgacgaatttgcgcatccagcgccgacagcggttcatcaagcaacagcacccgaggacgcacggcaatcgcgcgggctatcgccacgcgctgctgctggccgccggaaagctgatgcgggtagcgggtggcgtaatccgccatgccgacgatttttaaggcttcagtcacccgctcggcgataagccccctgggctgcttttgcgcccgcaggccgaaagcaacgttatcttccaccttcatatgcgggaacagcgcgtagttctgcaccaccatcgccagcccgcgtttgtacggcggcaactgggtgacgtcagtatcgccgatcaggatccgcccgccagccggttgcacaaaaccggcaatcgcccgcagcaccgtggttttcccggaaccggaagggccaatcagcgccagcacctcaccgggctcaatggtcaatgacagcggttttaagaccacgttgccgtggtatgaaacgcgcagcgagtccagggtgatcccggacgtccccgccagcgacggggaagaagtgacggtggttttcatcaacatcaggcttactcgctatcggtcactttatgccagcgggcaatgtcagccgacagcgataccgcgacatcatcccagttcggctcccagctcttcacgccgtcgagcgccgctttcgccgccttaaagttagcatcatccggcgctacatcgttgcgtaccggcaggccccaggagcgcgcgctgacgctggattgcgccggtttatccagcaggaaattgatcagctttttgccgttttcgctgttcggtccgttctgcaccagcccgatggtgtagggcagcgccagcgcgctgcgctcgcctttatcatccgccggccagaaaattttaacgttcgggttacgcgccatctgcgacaggttcatctgcagatcgccgttggcgacgtacagctcgcctttgttgaccagcgccgtcagcttaccggtcgaggccgatgggccaacgttattggcctgcagcttgcccagatactcgaagccggcgtctttaccgccgaggctatggaacgcctgcagcatcaccgctgtaccgtcgcccgcctgacccggcgtggagtactgcaacttgttcttaaagcggctatccagcagatcctgccagctggccggcgcggttttcagcaactggccgttatagatgaaggtcagatagttgttcaccagcggcgaatatcggtcgttggcgccggggatctgcgcgctaccttgcggggtaaaggttgccagcaattgctctttggcggcgcgctggataaacggcggcaccgtgaccagcacatcagcctgcggattggtgcgctccttggccagacgctcgacgatcgcgccggagccgccttccacatactgcactttgatgcccgtcgctttggtgaaggcagcgaactggctctgataccagctgttatcgccgtcatgcaggccgtcggcggagtaaaccgtgacgacgccgtccgcccaaaccggagagctggtcagcacgaacagggatagcagagcaagtcgggagagtttcatcgtgtaagcctcatcgcagttagttattctggtgtagaccagatttgccttcacgctaccgatggtttatgacaaaacgatgaaagaagtgtgtcgaaggagttaaaacgagcgggatgcgtagccccggtaagcgctagcgccaccggggagatcaaaaaatttaactaataaaatcaatgggtatcgacttcgatccgcaggctatcatgccgccagtattcaatatcgtaatcgagaatacgcccgtgctgatcgtaattcagcctgcgcaacagcagcgccaggcgcccctccatcacccccagcgcctcggcggcctgcggcggcattgaggtgggataaaacgacagatgcatactggtatagatcagttcgtagtgagtttgataaatctcggtcagactgccgttgagatcgtggcgcagcagctcaggcacccgcgcgggcagacagtggttttcgcagtagcacaccggacgcccgtcggcatagcgcagccgggtcagcaggtagacctgatcgaagggctgcagcgccagaggcgccattacatccagcggcacggcagccaggcggccatcaagcagcaccgttttcggttcgcgcccctgttcgagacacagcttgtggaagttggtattttgcgtcggatccagccatagacgctccggcgtcacaaaccagccgcggcggtcggcgcggtaaatcacgccgctggcctccagctgcgccaggctctcacgcaccgtaatccgcgtcgtgttgaacagcgcgcacagctcgcgctcggaaggcagcttgtcgccgcttttgagggcgccgttttgaatacgcgcctgcagctgcgccttaatcatcaggtattgcggcatctcgccagagggtgatttcatgtttactcactgccacttttcgtgcgctcattatacatagccagatgaattttttgttgcagcgccacatttcctttgaccctgtcccggctttgtctccatgataactataaatctggtatagaccaaatggtgagacaaatgacttcacgaaattacctgctgctgacccccggcccgttaaccacctcccgtacggtgaaagaggcgatgttgttcgatagctgcacctgggatgatgattacaatctcggcgtggtacagaccattcgccagcagctggtgcagttggctaccccggccgacggttataccgcagtgctgctgcagggtagcggcagctacgcggtcgaagcggtgctcggcagcgtcatcggcgaacaaggcaaagtgctaatcgtcagcaatggcgcctatggcgcgcgtatgattgagatggcgcaactgatgggcatcgcctgccacccttacgactgtggcgaagtctcccgtccggacgcggccgcgatcgaacagatcctgcagaacgacccggcgatcacccatatcgcgatggtacacagcgaaaccaccaccggcatgctgaatccgatcgaagaggtggccgaactggcgaaacggtacgataaacgctatatcgtcgatgcgatgagcagctttggcggcattccgttggatatcgccgcgctgaatattgattacctgataagctccgccaacaaatgcattcagggcgtgccgggctttgccttcgtgattgcccgtgaagcggagctggccgcctgcaaaggccgttcgcgctcgctgtcgctggatctgtacgcccagtggcgctgcatggaggacaaccacggcaagtggcgcttcacctcgccgacgcataccgtgctggccttcgcccaggcgctgaaagagctggcgcaggagggcggcgtcagcgctcgccatcagcgctaccgcaacaatcagcgccggctggtcgccgggatgcgcgcgctcggcttccggccgctgctcgacgatagcctgcactcgccgatcattaccgccttttattcaccggatgcgccgcagtatcgctttcacaccttctaccagaagctgaaagatcagggcttcgttatctatccgggcaaagtatcgcaaagcgactgcttccgtatcggcaacattggcgaagtctacgacgccgatatcaccgccctgctggcggctatcgacaacgccatgtactggaaacaataaggaaccgccatgaaccgtattagcgcactgatccttgactgggcaggcaccaccgtagacttcggctctttcgccccgacgcaaatcttcgtcgaggccttccgccaggccttcgatattgagataacccttgaagaggcccgcgtgccgatggggcttggcaagtggcagcacattgaggcgctgggcaaactccctgctgtcgatagccgctggcaggccaaattcggccgcgcgatgacggccgcggatatcgatgcgatctacgccgcgtttatgccgctgcaaatcgctaaggttgtcgatttttccgcaccgattgccggcgttgtcgacactatcgccgcgctgcgcgccaagggcctgaagatcggctcctgctcgggctatccgcgtccggtgatggaaaagctggtaccggccgctgccgcccagggctacgccccggaccactgggtcgccaccgatgaccttgccgccggcggtcgtccgggcccgtggatggcgctgcagaacgtgattaccctgggcatagacgatgtggcccactgcgtgaaggtcgatgatgccgcgccgggcatcagcgaagggttacatgccgggatgtggagcgtcgggctggcggtgtccggtaacgaattcggcgcaacctgggaggagtaccaggcgatgtcgaaagcggaaatcgccacccgccgcgagcgggcggcaggcaaactgtatgccgccggggcgcattatgtggttgataccctggcggacctgccggaagtgattgccgacatcaatgcccggttggcaaaaggcgagcggccttaagcgggtgaattcaccttcactttggccgccaccagcaggccggtaaacagcatcaatatccctgacaacaccagcggcgacagcagccctaagtggtcaagcgcaatgccgccgaccgcggcgccgcaggtgttggccagctggatcaccgccacctgaatcgacccggctttttccgcctgatcggagagggaacgggtgatccacgttgaccaccccaccgggatcagcgcaaacgcgaagccccagataatcgccaccgtcgaggcgatgattttgctctctccccacagcaccagcgccaccgcgcaggcggtcagcaccagcggcgcgatcgccagcgccgcttttaccgaacgcttgagcagcaccgaggagagcgaggtgccgataaagctggcgataccaaagctcagcagcaccagcgtcaggccgtcgacatcaaacccggcgagggtcatgtaaaccgggcgaatataggtaaagaaggcgaactgtccggcaaaggccatgaaaatggcgcacattccggccatcacccccggacgcttcagcagaccaaacatattttgctgctgagaagccgattcaccgggcagcgacggcagcgctttcagcacccagagcgtacacagcacgcccatcaccgccgcgccgttaaagacgttgcgccagccgataagcccgccaaggaaactgcccaacggggcggcgatcaccagcgcgattgataccgcgccgaagataatcgatagcgctttcggcaccacgcgcatcggcaccagacgcatggtcagcgatgcggacatcgcccagaaaccgccgagcgccaggcccagacaggcgcgccccagcagtagcagggtgaagctatcagcgaaagataccagcaggcaagaaagggtcagcagcagtgaaaacaggataaccacgtagcggcgatcggttttacctatcaccgtggtgataaacaggctggaaaacatcgcgacgaatgccgtcgtcgtcaccgactgcccggccatcccttcggagatgcctaaatccagcgccatcggcgtcagcaggctgaccggcaaaaactcaacggtaatcaggcaggcgacgcagaaagcaaccgcgaaaaccgccgaccagtttggccgcgcgagatcgcgtgcatggggtttggtttcatttgaatgactcatgagtgacctgcgaagaaagtggcggaaagctgcgcagtgtaacattttgtatgtgacgtacttaacgttttcgcaactcttctcgcttttcataagagggtgcgtagctgctcgcatgtttaaaaaaacgatgcttgctatcgctttaacaaatctcaggagaatttaatatagcactatgtgctatacttttaacgacaggatgtcagcaatgcgtatctttaaaaccaaatggttcgccagagaggctagctctcatggcatttccgacgacgagctctatcaggcaattcaatctgcgcttcagggcaaagtggttgatttaggaggaggggtttataaaaagcgactcaacaagaatcgcgatcgcgcaatcatccttaccaaaagcgcagggtattggttttatacctttctatatgccaaacaggatatggccaatatcaaccatcgcgagttaatgggttttcgtgagttagcaaaacactatgccaatctctctgaagagaaaacgacggtcttagttaaaagtaaagaactggtggagatttgcgatgacagcaaaaaataaatacaaaagcccggctttcgaagcgatccatagcgctgcgtcggggctattcagcgttggcgcaatcccacaggaaacaatgcgccattttgatgaatcatgtctcggtagcgtagccgcacttcaacccattgaaattaaagcgctacgtgaacaactcaatgttagccaacccgtgttcgctcgttatctgaataccagcgtgtctaccgtgcaaaaatgggagactggcgctaagcgaccgagcggaatgtcattaaaattgcttagcgtcgtacaaaaacacggcctgaaaatcctactgtagttatcctgccggatggcgcttacgcttatccggcctacaagtgacgagtgcggaaaccttaggccggataaggcgcagccgccatccggcacacaaaagcgatgaaccacaggccggataacaatgagatcagtgcagccagtgcacgccgtcttccgggagaaacaggtcgttatagcgctgctgaaggttatgcaaatcgctcatatccggatccagctcgcgcagaaacccttgcgccaggcggatctgcgcctcggtgatcggcgccgctaaacgcgctttttgcatcaggcgataccagtaatgcaggtttttttcgctggcgtcgacaatcgcgacctgccagatgagcagcacctgggcggcgttctgcagatgtgcttcattcggccgctccaggtaacgcaaatactcattaccggcggtttttcccagctgatcgatcatcgattccagcgggacaggcgtgatgccgaggcgttcgctcaggcggcggatcgcgcggcgtgaatcagaggtaagcacccgaaatcccacaacaaacaccactaccagggtggccagtcctatccagatcatgcatcctctcatccaatcgcagcctgactatcataatgggaatttgcctgctgtcgactgtcgggcctggcataatgcgcaagaaataaaaaagcccggcgcgaaggccgggcaaggttaccaaatacctggtgaatcaggcggcctgcaaaatacggttctttttctcgcggcgaattttacgctcttcaaagatagccacgatggccatcaggcagatacagccgacggcggcggcgtccagcgccgcaaaggtgccggcccagccggtcaggccgaagaccggggtgccgtcggcgatcatcccgagacccagtttggcgaagctatcgccgatcagataggcgaaggtgcccttgatcccatcggcggcgccgatcgcttttttcggtacgaaaccgacggcggcgacgccgatcaacagctgcggaccaaacaccaggaagcccagcgcaaataacgaggccagatagacgtactggttgctggcgtgttggtaaaccccgagggtggcgataatcagcgccagcgcgatgcaggccaccagcgcgcggcggccgttggccagatccgacagccagccccacagcagcgtgccgaccagcgcgccgacctcaaacagggtaaagccctgaatcgccacctctttcgacagcttcagctcctggaaggcgtacacggtggaccactgatcgataccgatacgcaccacgtagaggaagatgttggagaagcacagcagccagatcactttgtttttcagcacgtactcaacaaagatctgccacttggtcatcgcattttcttcggtctctttgtcctcttcgctgatcgcttcgccaaacagctcttccgccgtgccgaggccgtaggattccggagagtcgctaccgtagcgcaggccgataaagccaacgatcagcgcaataatcgacgggaagataaacatgccgatcacatggccgtcgaacagatagttggcgccaaacagcgccacgcccgccgcgcccgcgccgccgaggttgtgggagatattccagaagccgaggaaagtgccgcgtttgcgtctgggcgtccacttggtgatggtggaatagctgcacgagccgccggtgctctggaagaaaccgctcagcgcatagaaggcgatcatcaggaacaggctggtagaacccgcccccatgctggcgctaaagcccagcatacagatggcggagaggatcagcataaacggcaggaactgcttggtgtttttgccgtcggcataataagagaccagcgtcttgcccacgccgtaggtgatggagaagcccaggccaatcatccccagctgggtcatgctcagcccgtaggtggagatcatgtcgttctgcgcgatgttaaagttcttgcggatcaggtacatggtcaggtagccgatgaagaccaccagataggactgcatgaaaggtttgaaccacattttgcgccgcacatcgagcggcagatccagggtcggcttgcgcacctgattcagaaaggccagcatgggtatctcctgagctgattttttatgcctgcgtaataaccaggcattgtaaaaaccagcgcgccgtctggcctgagacggcgtccaggtaaaaccgggaaaatttcttagttttgtcccgttcgcggcgaaagggtgagctacatcacgcttcgctggcggtacgcggcgcctgcgcgtttaaaaacggcagcagcagcagcgcggaaatgccggcggcaatcgcaatcaccacgaagaatccggtccagtgccagatatccatcacctgcgccagcggccagccggaaagcgaggcgccaagataagcgaacaggccgacaaacccggttgccgccccggcggcttctttatgcgaacattccgccgccgccatgccgatcagcatctgcgggccgaaaacgaagaaaccggtagtgaagaagcaggccgcctgcatgacatagctggcgaacggcatcagccacaggccgccaaccgacagcaaaattccggcggcgaaaatcaggttcatcggcccacggttgccgttaaacagcttatccgagccccaccccgccaccagcgcgccgataaaaccgcccagctcaaacatggtcaccgccgagttagcggtcaccagatcgacgccgagcgtctccgacatatacagattgccccagtcgttaatcgccgcccgcaccacgtacaccagcacatagcacaacgacagcagccagatgtagggattggccagcacgtagcgggtcaggatcgctttacgagacatcccagcgccttcctgctgctgggcgatttccagcgcatcgtgacgccagtcgcccacggcgggtaaccccaccgcctgcgggcgatcgcgcagccgccagcacagatacagtccggcgaggatcgccagacagccggcaatggtcatcccggcacgccagccgtagtgcaacgccgccgctcccaccaccatcgggatcagcgcgccgccgacgttatgcgccgtattccatagcgcccaccagccgccgcgctcggtccgcgaataccaggccgtcagcagtcgggcgcagaccggcgagccccagccctggaagaaggcattcagtgcccacagcagcgcgaaagcccatagtgaggaagaaaaaccgaacagaatattcaccaccccggtggcgataagccccagccccataaaatagcgggcgtcggagcggtcgctgacgataccggagaaaaatttcgacagcccgtaggtgatatagaacagcgtggccagcaggccaatatcgctgcgggtcaggacgttgctggcgagaatttccgggaccgcggcgttaaagcttttgcgggtgaaatagaacagcgcgtagcccagccagatggtcaacaggatatggcgacgccagtagcgataacgcgcatcaagctcgcgtttatcgctaatcggcgcagcgtccggcggggcttttaaaaaggcgaacatcggcgatcctctcaggcgtaacgcagcggtagattgacgcacacccgggtaccatgggtgcaggagatcgtcagtgtgccgcccagggcggtcacgcgctcgcgcatgccggtcaggccgaacccctgcagattcgaccccggcggcaggccgcaaccgtcatcttccagcaccagcattagtcgctcatcctgctgccagccctgcagagtgacagcgctggcgctggcgtgcttgacgatattattcagcccctcctggcaaacgcgaaacagcgtcacgcgctggttctcgctcagtcccgcctcgttaatccgccagtcgagatggctgacaatgccgcggtcctccagctccatctcgcgcatcaacgaacgtaccgcctgctccagcggcaggtcgtcgagctgacgcggacgcagacggcctagcagtctacgcaccgagtcgtaaactcccagcgacagctgttctatcagctgaccgctctggcgcacgctggcattgtccggcgccagccgctgtacgatcccggcctgggtgcggatcgcggtgatggtctggccgatatcatcatggagctcgcgggcgacgtctcgccgcacgctctcttcggtctccagcaggcgttccgccagccgacgattacgcgccagctcgctttgtaatgactggttcagctcgcgtaaccgctggatccccgcccccaacagcagcccggtgaggctctgtgccagcagggaaagcaataaatcgaccgggtgatcgtgccaggtctggctggcaatcaaggcgatagcgttcatcagggtggcgatcagcgctccctgccagccgtagtgccaggcgagggcgataatcggcagcgccagacaaaacggggtaaagcgggagagctcggcgggcaggccaagctgcagccacaggctaatggtgaataacagcagataccagatcagatgccgcccgcgccagttaaccggctgcgccaccagcgccggccccagcggccgccagacggtgctggtaagatagtgccagaaaaccaggcaggtcggcgccagcgtcaggccgccggtcagcgtcaacagcagggtgttaagcccctcgtccccctccgccagccacggcagcgattgcagcagcgcggcggccattaacgccccgccctgacgcagcagcgtcagccagtcgcgctgctgccggtagcgcgagatcaacgccaccggcagcagagtcagcaggcttccggtcatcaaaattatcgggtgcgccagcgccacctcctgcgccagccataagataagcagccactcggttcccagcagcactggccagtagccgcgggggcattgcagcattaaccccagccgcaggccaaagggaaacagcagcaccgctaaatccgcgcgttccaccaaatgcagactgatgctccacaggcagaaccaggcggccgcgaagataaaggcgcagccgatgaccgacagcaatcgtgagacgacggccttcattgccagctatcgaacatgcggcgcgccagctcaacgtcgttgctgacgcccagcttttccagcaggttggcgcggtgtacgtggacggttttcggcgacagaccgagctcggcggcaatctctttcaccgccatgccctgcgccagcttttccgccacctgacgctcgcgtttggtgagcggatcctggcgcccggcggccaacttcatggcgatatccggcgtgagatagcaaccgcccgccgccaccgtgcgtaccgcggcgataagttcatcggggctgcagcgtttcgacaggaagccgcgcgcgccggcattcaacgcttgctcgatcagcgccgggctatcgtgtaccgacagcatgatggtcgccatccccttcggcagctggctgagcagctccagcccggaaatatccggcattgagatatcgcagatacagacctgcacgccgcgccccggtagccccgtcagcgcctcgcggccgctaccaaattcggcgacaacctgaaaatcagcttccagccccagcagctgagcaaagccggagcggacaatcaaatgatcgtcaataagggcgatggtggtcatggtgtttcctggtgcctgaaaacgccggatggcggcgtaaacgccttatccggcctacggattcactgcttgtaggccggataagcgcagcgtcatccggtaaaggcgcttaccttagcgataagcgcgtggctgttcaagccttgagcgctattcgaagaacaccgcaattttgttaaacatggtgggatcggactggttacgcgccactttggtgacatcttccagcttttcaatctggctaatcatctgccccagtcgctggtcatcatttaccagcagccagatgcggctgtgttcgctgccctgaattggcagacagagaatgccttcgacgttaaacgcgcgacgggcaaaaagcccgcacacgtgggtcatgacgccgggatggttgcggacggtgagttccagaatgacgttatcacattgtttttgcatggcttattcccccaccatttcagtattggccgcacccggcggtaccatcggatacactttctgctgtgcgtcgatgcgcacgtggatcagcgccggccccggacggtcgatgatcgcctgcagcgccgcctgcggatcgacttcattatttaaatcacaggtttgcaggccaaaaccggcggcaatctgcataaagttaatcatccccggataggtggcggcaaaaacgccctgctgatagaacaggctctgctgctgatgcaccagccccagcgcttcgttgttcagcaggataatttttacatccagctgattttcggcggcggtggccatctcctgaatattcatcatcaggctgccgtcgccggagaagcagataaccttgcgctgcggattcgccagcgccgcgccgatggctgccggcaggccgaagcccatggtgccgaggccgccggaggtcagccactggcgcggacgattgagcgggtaggcctgcgccgtccacatctggtgctggccaacgtcggtagtgatgatcgcttcatcatccacgcaggcggccacggcgttaatcaggccgtaatgggagagcgggtcgctttcctgcgggatggcgcaggggaattcgcgctgcaagtcggccaccagctggcgccattcctcgcgcggctgcgcctcaatctgcgggttcagctgggctaagacttccgccacatcgccctgaatcgccacgtgcggttgcttaattttgcccagttcggcgcggtcgatatcgacgtggataatcttcgcgttcgggcagaactgctcggtcttgccaatcgcccggtcatcaaaacgggcgcctaaaacaataagtaaatccgcctcctgcagaatgaagttggtgctgcgcgcgccgtgcatccccagcatccccagcgacagcgggtgcgccttcggcagcatgcccagcgccattaaggtcatggtggtcggcaggttggctttttccgccagctcacggatcgcctgcggcgcgttaatcaccccgccgcccagatacagtaccgggcgtttcgccgcgttgatcattgccgccgcttcacgcacgctttcaggcgcgaatgccggtgccggggcgcgctcgccaggctcaggcagcgcttccagctcaatggtcgccgactgcacgtccttaggaatgtctatccacaccggcccgggacgtccggactgggcaatacggaaggcgtcgctgatcacctgcggcagctcggcaatgtcgcgcaccagatagttatgtttggtgatggggatagagatgccgtaggtgtccacttcctggaaggcgtcggtaccgatcatcgaggccggtacctggccggtgatgcagaccagcggaatcgaatccaggcgggcatcggcgatcgccgtcaccaggttcgtcgcccccgggccgctgcaggccatacagaccgccggcttgccttcggtacgcgccatcccctgggcgataaagcccgcgccctgctcatggcgcgccaggatgtggcggatctgcgtgctctggcttaaggcatcgtagataggcaggatggagccgcccggaatgccgctgaccatagtgataccctggcgctccagtaaatgaacaaccagctgcgcgccggtaaagcgcattgtgtttgatgtggtgcccgaacttgccatgctccagtccttttcttctgggccgactttaccggggggctcgccaacaaaaaaccccgctcggtttgcgccggcggggtttggaattcgtgttgttccggaccctacggcgcattgccgacgacgaccaccacagacacgacgaccaccgcggctggcgcggtttttagtagggtcgaagcgatcagggttgcgttcattagggacctgttgtgtctaaaaataagctgaatttatacaaacacaggttttacgttttcacaatggatttattttcatccacgaaaatttgcgcgaaagatcacagttcggcgcaaaaggacagaaaacaaaaaaccccgccggagcgaggtttttatcagcatggttacaggtggtagccgcaagcacactgtattacgtcaacgccaaaagtatacgcgatcgctgcagttcgcgcaatttaaggtcggtttttctctgtcatagagtatggatgagaggggcggatttgtccaaaaaatactgttcatccatacagtgtttatctatactgggtgtgttcactttgtgccattcgggggccgcaagtttgaccggcgcaacgaagtcctggctgaaacgggtggtgccgtcagtgccttaaccccgagagagcacactgtgttacgtcaacaacgtgcagtcactggcccgcgcggcaacgcgtggctcagcgctgcgcacccctgtcgttgcaggcggcgggccgggaagccgttcatggaaaggacgaactatcggccagggcagacgccgccggcgacaggcagggataagctggcaacgggcagcggaaaggtacgtcagcttattgtgctccttaaccacaggagacgcgcgtatgggcggaatggatattattattttgatcctgaaactcatggttgctgtgttgcaactacttgatgcagtcctgaaacagttccgctgattcaggttcaagtcgcacctgaggggggcgggaaaccgcccccctgcaggcgcccgccgggcgtcccgggatgacttgatggaggaagctatgccacccctgttaattgccgccacgacgccggatgccccggggttcgcggcgctacgaattgaaagccttgaacagcatttcaatatgctgcgccgcctggcggaaaactggcagagcggcaaaaaccgctttaacgcgccgggcgaaacgctgctgggcgccttcgtcaaccaccagctggtaggggtatgcggcatcaatagcgatcccttcagtccgcagccgcgggccgggcgcattcgccacctctacatcagcgaacgctaccgtcgccggggcatcggccagcagctgctggtctcggttatcacccactccagcgcctggttcgactttctcaacacccatgccccggcgcaggcctggcccttttatgaaaggcttggttttcgcccggtgtacgatgaaccgcgggtgacgcatcgcctgttttgttcgctttaacccccgctggcaggcagcgcgggcgcgtgttacattccggtgaccttcactgttgaacctgtctgcgatgaccctcaccgtattctgcattttgctgttcgccgccctgctgcacgccagctggaacgctatcgtcaaagccagcggcgataaaatgtacgcggcgatcggcgtcagcggctcggccgcgctgatcgccctggtgatgctcccctttgccccgcagcccgcgctggtcagcgccccctatctgctggcgtcgtgcgcgttacaggtggtgtatacggtgctggtggcgaagacctaccaggtatcggatatgagccagacctatccgctgatgcgcggcactgcgccgctgctggtggcggcgataagcgtgctgttcctcggcgatcgtctgtcgccgctggcctggctgggtatcggcgtcatctgcctggcgattctggcgatggcctttaacggccgcgccagctcgcgcaaaggcatcgtgctggcgctgatcaacgcctgctttatcgccggttatacgctggtggacggcaccggcgtccggctggcgggctcggcgctgggctacaccctgtggaccttttttatgaacggcttctgcctgctgtgctgggcgatggtggcgcgacggcgtgaggccagtcgttatttacgtcagcactggaaaaaaggcatcctcggcgggatcggcaccatgggctcctacggcctggcgctatgggcgatgacccaggccccgctggcggtggtcgccgcgctgcgtgaaacctccattctcttcggcgcgctgatcgcctttatcgtcctgaaagagcaactgatgccgctgcgcatcgtggccgcctgcgggattgccgccggggcgatcctcctgcgcctggcgtagcctgagatggcaacattagttgccgttcctgtttacataatctgcctggaattccctcaacaatcggcactttgcagttgttctgtcattttaatatggtagattcctccatcgtttacgggatgtggtagtcacatattcttcatttatctttactcacaaagtattcatcgacatgaaacggcataagaacttcaatttgttgttgatgctggtactgctggtggccgtcggccagatggcgcagaccatttatattccggccatcgccgacatggcggtcgcgctgaacgtccgcgaaggggcggtacaaagcgtgatggcggcctatctgctgacctacggtatttcacagctgttctacggcccgctctctgaccgcgtcggtcgccgcccggtgatcctcgtcgggatgtcgatttttatgctggcgacgctggtagctattaccacccatagcctgccggtgctgatcgccgccagcgccatgcaggggatgggcaccggggtcggcggcgtgatggcgcgcaccctgccccgcgacctgtacgaaggcgctcagctgcgtcatgccaatagcctgttaaatatgggtattctggtcagcccgctgattgcgccgctgctcggcggcatcctcgacaccctgtggagctggcgcgcctgctacgctttcctgctggtcctgtgcgccggggtgaccttcagcatggcgaagtggatgccggaaacgcgcccggaaggggcgccgcgcaccaaacttctggccagctacaaaacgctgttcggcaccggcgcctttaactgctatctgctgatgctgatcggcggcctggcggggattgcggtattcgaagcctgctccggggtgctgatgggcgcggtgctcggcctgagcagcatggcggtgagtattctgtttattctgccgatcccggcggcgttcttcggggcgtggtttgccggccgccccaacaagcgtttcccgaccctgatgtggcagtcggtgatctgctgcctgctggcaggtctgatgatgtggatcccagggctgctgggcaacatgaccgtctggaccctgctggtgcctgcggcgctgttcttcttcggcgccgggatgttgttcccgctggccaccagcggcgcgatggagccgttcccgttcctcgccggaaccgccggggcgctggtgggcggcttgcagaatatcggctccggcgtgctggcctggctgtcggcgatgatgccgcaaaccggtcagggcagcctcggcctgctgatgatgctgatgggcctgttgattctgctgtgctggctgccgctggcctcgcgcttcacccaccatcagcagccggtataagcgcggcggtggttccccggatggcggctgacgccttatccgggctaccggactggtcgtctgccggcccgcgcaagcgcagtgccgtcattttgccgggtggcggcgcacgccttacccggcctccctaacaactccgagggatagcccggctctttttcaggtcaggctatgcagccactcgataaaggcgtcgattttcggccactggcggcccggcagggtggtcacgtaataatgctgatggcatttcagcgtcatatcgccgaacggcgcgataagctcgccgctctctaaccgcttctgcaccagccgtttacgccccatcgctaccccgacatgattcatcgccgcaatcaccgctaaatcagaacgatcgaagccaatgcccgacgattgcggcagttcaatcccaaattgttgtgcccaactgaaccattcatcggtgccggaatcattgctccatgcctggcgatcgtgaagcagcgtacagtggcgcagactggcaggatttgacgttaactgcagctggcgggcgtaatacggcgtacataccggcacgatcgcctcatccatcagaaaatggtggcttagctgcgacgacggcgcgtcatcaaaatagattgccagatcgatacccgcccgctgcaggttgacgttatcgttgccggtcagcacggtcagcgagatggccgggtagcggcgactgaaatcccccagcgccggcaccagccagcactgggcgatagagggccgcgagtagaccgtcagactgccggagagctcctggtttttgatgtccagaatctcctgattgagaccatccagcgacgccttcagcgcccagtaaacgcgcttcccttcacgcgtcagctccactttgcggtgcgagcggacaaagagctggatccccagctcctcttccagctgattaatccggtgactgacggcgcttggggtgagcgccagctcgtcggcggcaagggcgaacgactcgtgccgcgccgccacctcaaacgtcgacagcctggagagttgccagccgttcagcaaccgggtacctaaggtttttagcacatccattatgcgctcctggcgataatagggagtctggatgataaaaaaataatgccggaacttccgctaaaggatgagttaatttgacccatagcatatttagaggtcacttttagagctaaatcacctttttgattcaatttggctcatctgaaaggtcatttatatcgtttgtcagcccatgccgagtttctgttcaataaccacacgttacttacggcgaggtggggtatggaatcgcaaatttgggttgtgagcacattgctgattagcatcgtgttaattgtattaaccatcgtcaaactgaagtttcatccgtttctggcgctgctgctggcgagctttttcgtcggggcgatgatgggaatgggcccgctggagatggtcaacgccattgagagcgggatcggcggtacgctgggcttcctggcggcggtgatcggtctcggcaccattctcggcaagatgatggaggtctccggcgcggcggagcgcatcggcctgacgctccagcgctgccgctggctgtcggcggacgtgattatggtgctggtcggcctgatctgcggcattaccctgtttgtcgaagtcggggtggtgctgctgatcccgctggcattctccatcgccaaaaaaaccaatacttcgctgctgaagctggctattccgctgtgtaccgcgctgatggcggtgcactgcgtggtaccgccgcatccggccgcgctgttcgtggcgaataaactgggggctgatatcgggacggttatcgtctatggcctgctggtcggtctgatcgcctcgctggtcggcggcccgctgttcctcaggctgctcggcaaccgcctgccgtttaaaccagtgccagccgagttttccaacctcgacgttcgcgaagaatcgacgctgccgtcgctcggcgccacgctgtttaccgtgctgttaccgattggcctgatgctggtgaaaaccgtcgctgaactgaatatggcgaaaggcggcacgctgtatacagtgctggaatttatcggcaaccccatcaccgcgatgtttatcgccgtctttgtcgcctattacatgctcggcatccgtcggcaaatggggatgggcgttctgctgattcataccgaaaacggctttgggtccatcgccaacatcctgctgattatcggcgccggcggcgcattcaacgcgattttgaaatccagcggcctggccgatagcctcgcggtgatcctgtcgaaccttgatatgcacccgattttgctggcctggctggtggcgcttatcctgcacgccgccgttggctccgccaccgtggcgatgatgggcgctaccgccatcgttgccccgatgctgccgctttatcccggcgtaagcccggagatcatcgccattgccatcggttccggcgccattggctgcacgatcgtcaccgattccctgttctggctggtaaaacagtactgcggcgccagcctcagtgaaacgttcaagtactacacgacagcgacatttatcgcgtcgctacttgcactggccgccaccttcctgctttctttcattatctgagcgcaaagagacgtatgatgaaacacgctaacctgaccaccttaaccgcgaccttcccgcttgtgcaggatctgatcgccctgaaagaaaccacctggtttaacccggcaaccaccaccctggcggaggggttgccttacgtcggtctgaccgccgacgatgtgcaagacgcccatgcccgccttcagcgcttcgcgccctatctggcggcagccttcccggaaaccgccgcgagcggcgggattatcgaatcagaagtggttgccattccggcaatgaaacgcagccttgagcaaaaattcggccagccaattagcggcgaactgctgctgaaaaaagacagccatctgccgatctccggctcaatcaaagcgcgcggtgggatttatgaagtgctgacccatgcggaaaagctggcgctggaagccgggctgctgacgaccgcagacgattatcgcaaattgctgacgccggagtttaaacagttctttagccagttcagcatcgccgtcggctccaccggcaaccttgggatgtcgatcggcatcatgagcgcgcgcattggttttaaagtcacggtgcatatgtccgccgatgccagggcgtggaaaaaagccaaactgcgcagccacggcgtaacggtggttgagtatgaagaggactatggcgtggcggtcgaacaggggcgcaaggcagcggaatccgacccgaactgcttttttatcgatgatgaaaactcgcgcacgctgttcctcggctatgccgtagccggcgagcgcctgaaagcgcagttcgcgcaagcaggacgcgtggtcgatgccgatcatccgctgttcgtctacctgccgtgcggcgtcggcggcggccccggcggcgtggcattcggcctgaagctggccttcggcgaccacgttcactgcctgttcgccgaaccgacccattcgccatgcatgctgctcggcgtctataccgggctccacgaccagatagcggtgcaggatttaggcattgataacctgaccgcggccgacggtctggcggtcggcagggcgtccgggttcgttggccgggcaatggagcgcctgctcgacgggttctatacccttgacgaccagacgatgtatgacatgctgggctggctggcggcagcggaaaatatccgccttgaaccctccgcgctggccgggatggccggagcgcagcgggtctgcgccagcaaagcgtaccatcagctgcaggggctgagtgagcaacagctgcagcaggccacccacctggtgtgggccaccggcggcggcatggtgccggaagaggagatggcgcagtacctggcgaaggggtgctaatctttagcgcagcagcggcatcagcgcctctggtggccgctgctgtcgtcgcaggtcccgcatcactcgcatatagggcccgctaaaatcgtagaactgccggtaacccgcgcacagcgggtcttcctgttcgccacagcggcacaggcgcagccacgggcagccgtagcaggtgctgttggccgccggcgcgcctggctgggtcagcgtctcgccgcaccaggcgctcagcgtctcgctaaacagtaaaatattgatgcgcccaatatcttcccgcacccagcggtgaaagactgcgcagagaaactctccccaaagcgcggcgtcgccggccgccagctgcggaataaaatggatagcggtgagcccctgttgacgaagctgtgcatagaacgcctgcggttgatggcaatgatgcgcctccaccacgacagcctgaaagggagtgtcatgttgctggccgggggcatgagtgagaggcaaattcgccggacatcctgtcatgacatatccctaatgaataaaacgatcggttgaaggtgagtaacagcaaacaggaatgccagagaaagtactgcgagtgcgatcaaaaatttgtcacgaaccgcccgcggctgtaaaaaatcgctatcgtcgacatccatcagatgacgacggcgggtatagccccagaggatcaccgccacaatcgccagcacgccgatcgacagccagaacggcaggccggcgcggtgccagctgtgcttaatcgccagcgccatcagcgcgccgtagcccaacagggtgcgaaaccaggccagcgaggtgcgctctggctgaagaccgggatcgctttcccgccgcgcccggcgtttatccgccatacaccaccagcagcatcaccgcggccaccaccgccagcagcagaatgctaatcaccagcagcgtgcgggtatagggaagatcctgcttgaggcgcatcgccttctcgttattcagccagcgcagatagccatagatggccatgccgccggcaaagagacacagcagcagggcgagaatttcacggatcagcggcgtggcaaagtccggcgctaactggtcaaggccgacgccggcggcgagaaaaccgagcgccgtgcggatccatgccagaaaggtgcgttcgttagccagcgaaaagcggtaatccggcgcttcgccgaggcgggagattttcattacagttccttgttcatcgcgctgcaggcttcagcatagcgtaaatcaggaaccggggagaagaaccggcgccccgcagggcgccggtattacaacggggattaatgcagctcaggccagtaatctttgttggcggcaatgaggtcgtcgaggatcgctttcgccaccgaggcgctcggcacggttttcgacagggtaatcgcctgccacagcttgtggtacgagcgctgttcccaggcatcgaccaccagtttttccactgccacctgctggctcatcagccctttctggaaatgcgggatgtcgccgaccgtcagcggctccggtccgttgtggcctaccagacaagggatctccaccatcgcgtcggcgtcaaagttatggatcgcgccattgttcggcacaatcagcagcatcctttcctgcgtgttaaaggcgatagccgtcgccagatcgacgatataggaggcatgctcgtcaatctccagatcgccggcggtggatttcccggcggcgatgatcgcccggcaggcgctgaagacgtttttctcccgatgatccatcacctcattggcgcgggtgcgttccgggttggagtgggctaccacatagtccgggaacagataatatttcaggtaggtattcggcatggtctgcggatccagcgcctgcacatctttcgctttggcaaaggtgtcgttccagctggcctcggtgtgcggatcgttcgagggcggcacatagccgtatttcgccacatattcgcgcagtttcggcatcaaatcattgccgtcgaggtcctcaatcgacgtccaccagccgaagtggttgaggccgtagtagcgcacgcgcatctgtttacggtctttgaggccgacaatctgcgccatccgcccttcaatgccgatcggcatatcgcagatgttgaggattttggcgttcggccgcagacgacgtgtggcttccgccacaatcgccgccgggttggagtagttaagcatccaggcgttcggcgaatatttttccatataatccaccagctccagcacgccgccgatagagcgcataccgtaggcgatcccgcccggtccgcaggtctcctggcccagcacgccgtggcgtagcgggattttctcatcttgttcacgcatcggatatttcccgacgcggatatgcgccatgacaaaatcaacatcggtaaacgccgcctgcggatcggtggtatagctgaactcaatctccggcgcctgctctttgaggatcactttgcacgccttggcgatggtctcctggcgcgcgccgtcgttgtcataaaatttcagcgaccgcagcggaaaacgatcctggtttgccagcagcatcaggacaatgcccggggtgaaggtgctgccgccgcctgcgataacaactgagaattttttcatgatactgcctccgtcatggtggtatgttcggtcgaaagagaatctttcatcaggttttccagctggtcgcgcacctggggaacgtgcaggccgacgatgacctgaatcccgttgccgcggcgtactaccccgtgggcgcccagcgctttaaagacgtcgtcactttgcgttttcgccatatcgaccagcgcgatgcgcagtcgggtggcgcagttgttgatgctttcaatgttgtcggcgccgccgagggcctgcaggaagccagcggcctgacccagccgggtctctggcgcggcggcggccgtggttttacctcgtgccgcctggtaatcggccttgctgtagagcttgatttcgctctcttcccggccaggcgtcttcaggttcagacgcaggatcagggtacggaagactacgaagtagagggcggtgaaacagaggccgatgcctatctgaatgaacatcatcgaagcgtggtgatggaacattgggatccagttttgcggcaagaattgatcgagcaggccgccgccgaagttgcccaccacgccgcagatgtacatcaccgtcgccatggtcgccgccagcaccgcgtgaacggcgaacagcagcggcgagatgaagaggaaggtgaactccagcggctcagtgatcccgaccagcatcgcggtcagggtggcggggatcagcaggccggcgaccttgacgcggttttccggcgcggcagtgaagtagagcgccagcgcaatccccaccgaaccaaacactttcgagttaccgtgcagggcaaagccgccctccgggaacagcgtcttcagcggttccgtactctgactgaacgcctgcagatgctctgcccagtagacctgcagtccgccctccaccaccgccgggccaaagatgaacgggccatagacgaagtggtgcaggccggtggggatcaggatgcgctcaaggaagatgtaaacccacaccccaagcgccccggctgagcgcagaaaggcctgcagcgattcaatacccagctggacctttggccagccgagcagggtcagccaggcgcaagggatcatcgcgaggaaggcgacaatgaccacaaacgatgaaccctgaaagatgccgaggaataccggcaggggtttatcgaaatagcgattgtgcagggccgtcaccagaccggagatgacgatggcgccgataatgctggtgtcgagggttttaatcccggcaatcatcgtcaggccgctgccggccgtgggttcagcggaaaaatcgacgccgaagaagtggccccaggtcatccccatggcgttgataaagtagttccaggtgagaaagctcaccagcaccgccagacaggcccggccctgggcctgtttcgccaggccgatcggcagaccgacggcgaaaatcagcggcatattacgaaagacggtccagccgccctcctcaatgatgtgaacgatctgggcaaacaggctgtcgggtgcggtcagcgcttcgccgacgaacatcgggttgcgcagcatgatggcgataccgaccacaatcccggcaaaagggaacaataaaaccggggtaaacatggcgccgccaaagcgttgtatttgactgagcattgggaaatcctcatgtaacaactcgtagggtgagtggccttctttttcttgattaccggcctgactggagaataaaaatttgcccgtccgacaacatgccgcgccgttgcgattcgtgatcccattcatggttttaatttggccaaagttgtctacttcgataacgaaagttagacatcgataagtcaggcagcgaaattaactaaatgaatgtgtcttaattgattgtaattaacctacttttttagaaaaaagagcacaaagcgacatccccttttcctgcacaagaggactactggtgatctacaaatccattgctgaccgcctgcggctgcggctgaattccgccgacttcgccatcggcagcccgctaccaggagagaaaaaactggccgaggagttcggagtggcgcgcatgactattcgcaaagccatcgatctgctggtggactggggattggttgtgcgtcgccacggctcgggaacttacgtggcgcgtaaagacgtccatcatgaaaccagcaatctgaccggcctggcggaagtgctgcgcaagcagggtaaagaggtggtgagtcaggtgctggccttcgaggtgatgcccgccccgccggccatcgccagtctgctgcggattaaaattgatgaacggatctacttctcacggcgggtgcgctacgtcgacggcaagccgctgatgctggaggatagctatatgccggtgaagctgttccgcaacctgtcgctgagtcatctggaagggtcgaaatttgattatattgagaaggagtgcgggatcatcatcagcggaaactatgaaacgctgacgccggtgctggcggacaagcagctggcgcgctcaatgaacgtcccggagcagacgccgctgctgcgtattacctccctttcctacagcgacagcggcgagtttcttaactattcggtcatgttccgcaacgccagcgagtatcaggtggactatcacctgcgccgcgtccaggcgcaaagcccgctagcttagcccccagaacagcacggcgagtagctgcggggtgataatgcgcaggaacatcaccagcggatagacggtggcatacgagagcgccgctgcgccgctggtggcgtgcaggttgttggcgaaggccagcgccggcgggtcggtcatggagccggccagcatgccgcacagcgtcagatagttcattttcgccagcatgcgcgcgaggacgcccaccgtcagcagcgggatggcggtgatgaaaataccgtaagcgatccagctcagaccatcgccctgggtcagggtggcgacaaagtcaccccccgattttagcccgaccaccgccagaaacagcactatccccagctcgcgcagcgccaggttggcgctcggcggcataaaccagtacagcttgccgatactgccgatacgcccaaggatcagcgccataatcagcggcccaccggccagtcccagcttcagtgcggcagggaagccgggaataaacaacgggatagatcccagcagtaccccgagtccgatgccgataaacaccggcagcatctggacctgctgcagcttctgctgagcgttacccagttcggcggccacggcgtcaattgcctccggacggccgaccaggttgaggatgtcaccaaactgcaggctggcgctgctgctggctaccagctcgacgcctgcccggttaagccgggagatcactacgtcatagcgctgtttgacgtgcagatcgcgtattttcttccccagcactttttcgttagtgaccaccacccgctccactttcagatcggtgccgcgcgtcgacagcgaggtcgccacctcctggcctatcaccagctgcgcattgtgcagatcctcaggtcgccccaccaggtgcagcaggtcgccagcctggataagggtgcccggcgcaggcaccatcaacagctcgccacgcttcagccgcgaacagacgatgttgtcgttgttgagcatcggcacatcctgaatcgccatctggttgaggttggggttttccacccgcacgttgatggtgtgtaaatgggcgtggccgttaccgctgctctcctcaaaccgctgggcctctttctcgacattgatgcgaaagaacagacgcaccagccacatggtcagcagaatgccgcagatgccgaacggatacgccatcgcgtagctcatccccatttgatcgaccacctcgaacggtacgccgagatcgcgcagaatttgctgcccggcccccagcgccggcgtgttggtcaccgcaccggaaaagatgccgagcaccaccgggagaggaatattgaacagtttatgcagcaccgcggtcaccaggccgccgaggataacgataagaatagcgaacagattgagccgcaggccagagacccgcagcgaggcgaaaaagcccggccccacctggatgccgatggtgtagacaaacaggatcaagccgaattcctgaataaaatgcagcatcgggctgctgagggcgacgcccgcctgatcgacaaagtgaccgacgataatgccgccaaataacacgccgccaataccaaagccgacgccgcggattttgacattgccgatccacaacccaaccaccgccaccagcgccagcacgctgaccgtcaatgctatctcactcatggtaccgtccctgtgaataacattattattaacagggattatgaccgcggccaggcggattgtatgctgcctggcgcacaataatcatggagtaagatacgctactcaggcgcgttcttatttttcgctgcgatagtgagttgctgaatacttttctccggggaaggaagtgcttcaggcatagtgccacccaggtctttaatagtctggcgtactttttgccctacgtcataatgcgttttgttggcgagttgcttcgaatcaaccgcgtcccgacgtagtttttcttccgtttgggtagcacgaaacaggttggccgcgagctcagtcgatcccatatagtcgagtattttttggcttttctttaggcccttacgctcatggattgctttttggtcaagaccaccatagagacctttataaccatggttttgaaagacagcaaaatcaagagtcgtctcaacaccagcacgttgggccgtttcaaccagatgtttattatgctctttgagctcattgcgcaggaacagtcgcttttcatcctctcgtagagacttaaatatttgatcatcttgcaattcctggcgccgggtttgcaaggcaaagtacgtttgccccgcagcaatcaccggtttcgacggatcgccattttgcactaccagatagcaggcgtagcgtgagaggtggaaatcttcaagattcctgctggcgccagaacctaattcgaccattttgttggtttcaacaaaatggtctgccgagggatgaccactcgcctcacatgaaattatcgcttttgcaatgaccttataaaaattccgccactctttatagtcaagcaggggaccaaggttgcgggcagaccaatactcccgccccgcctcatcgctctttctaatcgcttcaaatggctgctgttcgttcataacgtatccttgtttgagtgagtcccaaagtatgattgttttttaaactgaaacacccgttgcagcaaggaagtttattgtgctctcgcacacaaaaaagccccgaaaatcggggccttataagttattcgcttaattaactatttaatgccggtcgttcgctgatggcgatacgctgcggggcgatctgctcaggctcattgcgggtcagatcgatatgcagcaggccattggtgaaggtcgcgccagagacctccatgttgtcggcgagggtgaagctcaggctgaaggcctggctcaccaacccctggtgcagccatgtggtctctttttccggctgctgcggcgtgcctttcaccaccagacggatgccttccagttgaatatccagatcttcctgacggaaaccggccagcgcaagggtaatgcggtagtggttatcgtcgcttttttcgatgttatagggcgggaagctttggctttcaccggcggtttgcagggcgctggccagtttgtcaaaaccgatccattgacgcagcaggggggataaatcgtagttacgcatactgttttctccttctaagaagcgagtgaatacctgcgaattctgtaaattcgcatctgctccctgacggcgagcaggttgttacatcaggccgccacgcggcctgaaacggacaattagttgatttcgatgcggcgcggcttgttcgcttccgggatcacccgttccagatcgatatacagcaggccgttcaccagattggcgccgcggacgtgaatgttttccgccagctggaatttgcgctcgaagttgcgctcggcgatcccctgatacaggtaggtccgctctttctgctcggcggcgtgggcgcctttgacgatcagcagattgtcctgggcagtgatctccagctcgctttcagcaaagccagccaccgcgatagcgatgcgatagtggttttcgtctaccagctcgacgttatacggagggtagccgccgttgctctggctttgattgttttccagcaggttgaacaggcggtcgaaaccaatggctgaacgatatagcggggaaagatcgaagttacgcatagtaaatagctcctgaaaatcagcgagaatcaaatgaccttccatcgtggacaggccgcggtaacccggaatacccctcaggcgtattctcagtgggttacacttataaaatgggtttctccccgtgtttttcaagggattgagggcaattttttttgcagtttatcgatgattgcttagactgggtggaggagcacaaaaagcaaagtgcgatgcccgccacagtgcggcgcaataacactatgcattcacgggatggcccgatataaccgctgaaaggttatctcaacgcccgaaacgacaatggaagaacaatgaaaagcagacgactgttaaagctggtcctgttcagcgggataataagcctgagcggttgctccagcgtaatgtcacataccggtggcaaagagggaacctatccgggcacgcgatccagtgcgcaaacgctgggggacagcgataccaactggggtgtgaaatcgctggtggcgctggacatgccgttcaccgccgtcatggataccctgctgctgccgtgggatatgttccgcaccgacagctcaatcaaatctcgggtcgaaaagagcgagaaggctacgctggcgaccaactcggtgatcccgccagcgccgatgcctgcccagtaagttatcgtccggtctgcgtaacccacagctgacgataaccgtccacctcctccatccaggcaatctgtttaccgtctggcgaaaagacgatcgcgtccgccgagggcgcatgcgcatgcgtatcggttaaaaaggtgatatctcccgtaccggcatggcagcaggcaatccgatcctccagcgcaaaacccagccactctcccgacggatgccagttaaacgccgactggatacccgacgcgtgatgcgtcaactgccgcggctcgcccccctgcggggaaataagccacagctgcactacgccggcgtcgtcgcgcatcagaaaggctatcgccgtcgcctggggattggcgcgcacccagtggcgcgggacgttcaccagtcccgggtagcggcgatggtgggtgaaggtcaaacgacgctggctgacgcccgccggcggcgccggcattgtggttgcggtaccggccagcggcgccccgccaggctgcttccagccggcttcatcctgcggcagatcgacaataaacagctcaggcactttatcgccattttccgccagcgtatcgccaataaacgccagagtatggttcccgacccagccctcctcataggcgcgattaatctcatcgctgcccggcgcgggtgccggcgtcgtgcggcttaccagcacacaccagtggctgccgccatattcgcgcggatgctgtccctgcggcgtcaccggtccatagggcgccgccacgccgacgttgcgcagatccagcgccggatcgcgctggtgcagcacgtgatcgttgtaggtaaaactgacaaactgaccgttggggctatagacatggacgtggctgccgccgcgcagcgcgccgggcgtgtaggggggggtaatgtccatggcgtccagattctcgacagccccctgaaaggccaccaccccgcggcgatgatgaaaatcatactgccactgcgcatccggccgctcggggccatgaataaacacatagcgctcctgggttggatgcacggttaccacgcccacgtgcgcgccctgcgtggcacgataaatggtctccacagtaccgctgtttacgttcactcgctcaatggtttcgccggtaaacgatgcgccggacggacgaacgtcgaataccagccactggctgtcgggagtccaggtattaatattggtaagctggtgatgacggggagcaaaagtgacttgtttcatgacgataccctgatgcgagacttacgcatcagggtagcgtatcgcaaaaaattagcctacacgtttcacatcgccgaccagcaggatataagacagcgcgcctatcaacgccaccacggagatataaaccagcgccgggccaaagccgtaatcctgcgccagatagccaatcaccagcgggacggtgatgccgcccaggccgccaacaaagttaaacaccccgccggtcaggccgatcaggcgcatcggcgccagggaggagaccagcgaccaggtgatagacgcaaaaccgttaccgaagaacgccagcgccatcagcgccatgatccagatggggtcgttggtgtagtttgcccccatgatgcaggtggagatcaacagtccacagatgatcggcgttttgcgcgccacgcccagcgagtagccttttttcaccagcttatccgccagccaaccagacagcaggacgccaaaaaacgcggcgaggaagggcaccgtggtcataaagccggccttcagcgcggtgatgcctttttcctgggttaagtagttcggaaaccaggtcaggaagaaccacagcgtcgaggttaccgcgaactgtccaaggtaaacgccaaccagcttgcggtgaaaaaccagcttccagtccgctttcgataacggttgccgcgcctctttcttcaccggcgcatcgccatccaccaggccgccgccgtcgcggatatagtcgagttcggctttactgatgcttttagtcaggcgcggcggttgataaaccttgaaccagatcagcgaccagataatgccgataccgccggtaacgataaacacccagtgccagctcaatagctcctggatccagatcagcagcggcgtgaggaaagccagacccacaaattgccccgaggtataaaacccgacggcggaagcgcgctcgtgctccgggaaccagctggtcaccatgcggttgttggtcgggaaggctggcgcttcgaagatgccggtaatggcgcgtaaaccgataagcgacattaaaccggtggcgaagccttgtagcaacgtcgccaccgaccagccaaatatagcgataaagtaggtaagcctggatcccacgcggtcaaggaaccaaccgccagggatctggcagagggtatacagccaggcaaaggcggaaaatacgtagcccatttccgctttgctaataccaaactcctcctgaatatgcgccgaggcgacggcgaggttggcacggtcaacataacaaataaccacggtaataaagatcatgatgagcgtcagataacggcgacgcccggtttttacagcggtaactgaaatatccatcgcaatctgtctccagattttgggcatagcgaagccgctcaccatgcccggtaatttacagagggtgtttttgttttttattaataactatgttgcgatgcgctaaataattcgtgctggggaaaggcggaaaattttcgcatccctgggagcatacaatagtatgtgaccagggtaagaaaatgcagccaacgcatcaccagtgcgaagtatgacgcgcatttaccattcggcgacagatccatcctcataccgccacaacggatttcgccagtccggcgcgtttttacttaactcaatcacgcgggcctcatcaatttccacgcccagccccggcttcatcagaggtttaaagaagccgccttccatattgaaatcttctttgtttttcacaaaatcaagcagttcggcgcctttgttgtaatggatccccatgctctgctcctggaagaccgcgttatgcgaaacgaaatcaacgtgcagacaggctgccagcgcgatcggccccagcggacagtgcggcgccagcccaacgtcataggcttccgccatgccggcaattttatagcattcggtaataccgcctgcgtgcgacagatcgggttgtaaaatagccaccccgcccgcttccaggacccgtttaaattcaaagcgcgaaaacatacgttcgccggcggcaatgggaatatgggtttgcgccgcaagccgcggataatattccgcctgctcggctaataccggctcctcaataaataatgggcgatatggctccagctctttaattaataccttagccatcggcgcgctaacgcggccgtgaaaatcgagaccaaactcaatttcattgccaaacgcttcacggatttgcgccacggtattcaccgcggcatcaaccgcgcgggaattatcaatgatacccatctcttcgcagccgtttaatttaaaggtgtcgaaaccaatgccgcgcagcttcttaatcccgtcaatcacttcggcggggcggtcgccgcccacccagctataggctttaattttgtcgcgcaccagcccgcccatcagttgccacaccggggcattcaggaccttacctttaatatcccatagcgcctgatcaataccggcgatggcgctcatcataatcgggccgccgcgataaaagccgccgcggtacattacctgccacaggtcattaatccgcgccggatcctgaccaatcaggtaatcgccaaattcatgaacggctgcctccaccgtacgggcgcgcccttcaatcaccggttcgccccagccgacgatgccttcatcggtttcaatcttcaggaacatccaacgcggaggtaaacggtacgtggtgatattggttattttcatttcactgcctctcgatacgcttttacgaatgcggctgcctgctgcgcggtacgttcaaccgactggccggcacgatagagatcgctacccaatcctgccccaacacagccggcattaatccactgcgccaggttttccggcgtcacgccgccaacggcaaagaccggaacctcgggcggcagcacggctttcaacgctttgatgtaatccgggccaaaagccgatgacgggaagatttttagcgcctgcgcgccggcatcgagcgcgctaaaggcttcgctggcggtggcgcagcctggacacacggtcatgccgtaacccaccgctcgccggatcacttccggttgaatgtttggcgtcacaatcagccgacagcccatggccgccagcctgtcgacctgctccggttgcagcaccgtgcccgcgccgataagcgcctgctcgccgtaagcgtcgacgacctgcggaatacttttctcccactgcggcgagttcagcgggatttcgaccgcgtcgaaaccggcgtcgataacggcgccaacgtgagccagcgcctcgtctggcgtaataccgcgcaggatagcgataagtggaaggttagtttgccactgcataagcgatgctccttattcctgtctgaaatgccgtatcgcccgcaaccgcgctgacttcgcggccaatggcggcgaatgcctgctgatagcgggatgttaacgatgacccagcgacgagactgatcgcctgctgtccggcgaatgtgtcgctgagggtggcaacttcagcgccaatcagcaggccggaaagaaattcgctaacctgctcgcgaggcagcgcgcccagcacgtgcgaagcgcgaacttcaaacagctgcggcaggacggcggggttgttgataccgcgctgcagacctgccgcgaatgcggcagcggacgtttcctgcggcggtaagccggcgcccaccagcgagagctgaagcaacagatgatgcaattcaccggtcaaaacggtacgaaaatcgtgaatttgccggcgatcggccagtacccacttgcagtgggttcccggcatcacgtagacagacgaaggggctaaggcgcgagcgcccagcagctgcgtttcttccccacgcatgacgttatggttatcgtcacgggaaacgcaaaggccgggaattatccagatattgtcgccaacggcagttaactgctggccaatatccgagaaagcggcaggaagcggcaaataaggggcgattttccagcccacgttgctgccgaccatccctgccatcaccaccggtgtggcgccatcgcgccagtgctgggtgatttccgctaacaccgcagcgggagagcgaccattcaggcgcgttacgcctgcttcagattgcctgctttccaggcattcttcgccctgataaagccaggcgcgtaaattcgtcgatccccaatctattgcgatgtagcgagccgtcatgtgatttccttaagccttcgtgtcgagctggcgatcatcgtcaacgccgcctgctccgccgcgtcgctatcctgatgccgaatggcgtcaaatagcgctttatgttcctggagggttttcggcatgttgccttcatcgcccatccaggtccgttcaaataccgcccgctgcagcgaactgatcgccacgctaagctgctgtaaaaccgggttatgtactgactgcagcaccgcctcgtggtagcgaatatccgcttcgttaaaggcatcccggttttggttgttggcgatcatgtcattgagcgccgactcgatttccgctagatcgcttgaggtggcgcgttccgccgcccaacgcgcgatggcgggttcaaccaggttgcgcacttcactcatcgcgctgataagacgcgggtcatagtcattttccagtacccactgcagcacctcggtgtcgaggtagttccactggtttctgggagcgacaaacgcgccgcgatagcgcttcatttcaatcagccgcttcgccatcagggaacgaaacacttcacgaatgatgttgcgcgaggtttcaaactcctcacagagttccgcttcggccggaagcgccgaacccgggacgtatttaccgctgacgatctgtttgcccagcgagatcacaatgcgatcggtcttattgagagtcatggagagtccttgtgctctatgtgtactgctctactttaccgtcgctgctgaatttcgcctcatgtttgtactactaacgtgatgctgtacgttatcaacatgagcgtaatgtagtacaacattattgtgttgtactacaatttggatcacaaaaagaacaattcatgaaaattaaagcgcagcggccctgacaagaggcgataagagagaaaattaagggaaggaggcgttaaaacgcttcgccgacctggaagtaaaagccgctgctgccattgccgataccgtagtcgaggcgaacattaacgcgaggtttgaattcaaagcggtagccaacgcccgccgaaggcagccagcggccattattcagcgacgacagtgagggccccatggttcccgctcctgcccaggcgacaatcccgtgccgccaggtgagctgccggcgatattccagctgaccgctgacgacgtttttatcccggtagcgcccctggtagtagccgcgcatccgttcatcgctgccgagcagcggcatcatgctccacggtacctcgccctgggtgaaggcgccatcggcctcccaggcgagcacgcttttctcgctcagggcatgataatggctatagtgcagctgaaattcctcaaagcgggtatcgctacctaatccgggcgcatagtgggtatagcggaggttggcatactgaccccggcgcgggttagggacaaagtcgcgatcgtcccagttgatatcgatgctggcgccggagctgaataccgacggtccctgcggagtgttttctatcttcggccgatcgtcatggtccatctcatcggcattctgcgccgccagcgaccatcccgccccgagataaacatgatcgataagctgccgataaagggtgggtcgcagagtcagtacccgggcggtatacttctctttttcattgtctttatccccggcatgaaaaccctgcccccaataataagtgggcgtgttggctatcgacccttcgacaaaaacgcgccacagatcacgatcgaaaaaggtgtagtttttcacgctgaggccaaaggcgccggtagagctggcgtagccgctgagcgtcagggtcgagttctggctggtggtatcctgcgggtcgggacgatacaggccgacgacagcggtgccaatgcccaaccctagttccggcgtatagaacggaccgggcatcacgccccagtcgatgcctttgctggcgtcgaacttatcgctggcgccgagatgctgcagccagccgtcgattttctcgcggctgagcgcctcggcctggctgcctgtcgggcaggccatcagcagcagaaaagtgataaacagtcggctcaaaagcgatactcgccggcaataaagaaactgttacgttcggcaaagccaaactcggtagtaatattaaaattctgcgtcagctcgtattgcgcgcccaccagaacgttccatggcgactgcagatgctgcttcacatcgaagcgaccgttattgtcctggttggccagattaaccatattctgcagcatcggcgacggcatcgagagatcgctgaggctgcctttaaactcctgctgcacatcctgatacatgctgccaacccacagatttagctttccggcggggagatgcagcgcatcgaccgatggcgtactgaaacgatagccaacgcgcggcgaaaaggtaagcgcatcgatgctgccgtcgaggatatcaaagcgcgtttgcgtgtagttggcgtccagcacggtaaaccaattgccgacgccgcccaccagggtggtgcccatcccgtaggtagtacctttaaaatcgagacgaaagtcgagatcctgcatccccggcaggggcaccactttaccgttcggtcccttcaggccgacagctatctgcgaaattgaatgcccttcggtgtgccccaccaggccataaacgttcataaacggcagcagccaggcatccagcttgagcgtctcggttttgctgctttcccgcgtatgaccaacgccaatctggaaagcgttatccagcgagaccggcccattagcgaaaatgttattcacggcgtgcttgcagacaggatccttaccgcaatcgatattgcggccatccagcgacagcccggtgaagtttatgctgtcgacattaatattctgccgcatatccatatagttaatgctgacgccaaacggcagcggcaggacgtagccgcgctttctggcctcatcgcctagcaaagggagtagcgaggacgatgctgcggccgcaggctggcgactttctggcaccggcagatccgcgggctctgcgccgtgataggcatacgccggttcgagcggcgccgttggttccgcggccgcgcaaatctgaacagaggcgaatggcagcgtaaccaacatcaaacggtggtatatattcatgaaaagtatgatgttagttctgagttgctaaaaagagggcgggtagcttatagaatcccctgcaaggattgagggatttaaatgcggattaacatctgttcatgaaaaaagagaagacagacccggcgaacgccgggccggaaagaagtttacgctaaaacgtatttttcaatggcgaaggcaacgccatcttcaaggttcgatttggtgatgaagttcgccgcttctttgaccgcaggaatggcgttatccattgccacgccgacgccggcaaattcaatcatcgcgatatcattttcctgatcgccaatcgccataatctcttccggcttgatgcccagcgcatcggccagcgacttcacgccagtgcctttattgacgcgtttatccagtatttcgaggaagtaaggcgcacttttcagcacggtgtacttctctttcacttccgccggaatacgggcgatggcctggtcgaggattgccggctcatcaatcatcatcactttcagcagctggatctcaggatccattttctccgcttcgcagaacaccagcggaatggttgccacataggattcgtggacggtgtagtagctgatatcgcggttcgcggtatacagcgtattgcgatccagcgcatggaagtgggagccgacctcgcgggagagctgctcaaggaagcgatagtcgtcatagctcagcgcggtttgcgcgacggtgcttccgtcaccagccttctgcaccagcgcgccattgtaggtaatgcagtaatcacccggctgctccatatgcagctctttcaaatagctgtggacgccagcgtaagggcgaccggtggtcagcaccacgttaacaccgcgctcgcgcgccgcggcgatggcggctttcaccgctggagagatggtatggtcgggcagcagcagcgtgccgtccatatcgattgcaatcaatttaatagccatagggtccccgggtaagatgagtctcccctcatgctaacgcgattccgctcaaaaaacagtaaaagtgtcggccagaaagggggatggaaccgcagcagcggattcctcttttagcggcaaaagaaaagcccgatcgcgcgatgcgaccgggcttatacatcctgttgccccggtaaaactcgttaccgggaaacatgcggcttaaatatcgatattcgccgctttcagggcattctcttcgataaacgcgcgacgcggctcaacggcatcgcccatcagggtggtgaacagctgatcggcagcgatggcatccttgacggtcacgcgcagcatgcgacggctgtccggatccatggtggtttcccacagctgatccgggttcatctcgcccagacctttatagcgctggatggagagaccgcgacgggactctttcaccagccagtccagggcctgctcgaagctggctaccggctgacgacgttcgccgcgctcgatgtaagcatcttcttccatcaggccgcgcagtttctcgcccagggcacaaatacgacgatattccggccccataatgaactcgttatccagcggatagtcggtatccacgccgtgggtacgtacgcgaataaccggctcaaaatgctgcagttctttgttctcgtggagatcgaatttccactggctgccgtgctgttctttctcgttcagctcggagaccagggtgttcacccagcgggtcaccttctgctcgtccgccaggtcggcctcggtcagggtcggctgatagataagctctttcagcagcgctttcgggaagcggcgctccatgcggccaatcattttctgggtggcattgaactcggcaaccagtttttccagcggttcgcccgccagcgccggcgcattggcgttggtgtgcagggtcgcaccgtcgagcgcgatggagatctgatactgatccatcgcttcgtcgtctttaatgtactgttcctgcttgcctttcttcactttgtacagcggcggctgggcaatgtagacgtggccgcgctcgacgatctccggcatctgacgataaaagaaggtcaacagcagggtacgaatgtgcgagccgtcgacgtccgcatcggtcatgatgatgatgctgtggtagcgcagtttatccggattgtactcatcgcgaccgataccgcagcccagcgcggtgatcagcgtcgccacttcctgggaagagagcattttatcgaagcgggctttctcaacgttaaggattttacccttcagcggcaggatcgcctggttcttgcggttacgaccctgtttagcagagccgcccgcggagtccccttccaccaggtacagttcggacagcgccgggtcgcgctcctggcaatccgccagtttgcccggcaggcctgccagatccagcgcgcctttacgacgagtcatctcacgagcgcgacgtgcggcctcacgggcgcgcgcggcgtcaataattttgccgaccacgattttcgcatcggatggattttccagcaggtattcgctcagcagttcgttcatctgctgctccaccgccgatttcacctcggaggagaccagcttgtctttggtctgcgaggagaatttcggatccggcaccttcacggataccacggcaatcaggccttcacgcgcatcgtcgccggtggcgctgactttcgcttttttgctatagccctctttgtccatataggcgttaagagtacgggtcatcgccgcgcggaagccggcgaggtgagtaccgccgtcacgctgcggaatgttgttggtaaagcagtagatgttttcctggaagccgtcgttccactgcagggccacttccacgccgataccgtctttttcggtggagaaatagaaaatattcgggtggatcggcgttttgttcttgttgagatactcaacgaacgccttgatgccgccttcgtagtggaaatggtcttctttgccgtcgcgcttatcgcgcaggcggatagagacgccggagttcaggaacgacagctcgcgcaggcgtttcgccaggatgtcatattcaaattcggtgacattggtgaaggtttccaggcttggccagaaacgcaccatggtgccggttttgtcggtttcgccagtcacggccagcggtgcctgcggcacaccgtgttcgtacatctgcttgtgaactttgttatcgcgctggataaccagctccagcttctgcgacagggcgttaaccaccgagacgcctacgccgtgcagaccgccggaaactttataggagttatcatcgaatttaccgccagcgtgcaggacggtcatgataacttccgctgcggagacgccctcttccgggtgaatgccggtcgggatgccgcggccgtcatcctggacggagacggagttatcgctgtggatggtgacaacgatatctttgcagtaacccgcgagcgcttcgtcgatagcgttatccacaacctcgaataccatgtggtgcagaccggtgccgtcatccgtgtcgccgatatacatacccgggcgcttacgcaccgcatccagccctttcaggactttgatactggaggagtcataagaattcgacatcaacgtttctcgctcatttaatcttgggttaatccgttattttacctttttccacgcggaacatcttcgaatttttgtccgacatgtccataacgtgttcagcgctgatcgcgctgacgaaaacctgcgactgcgtcgctttcaggcggctggataacagaccgcggcgggcatcatcaagttccgaggcaaaatcatctatcaggtacaggcagcgccgcccgctgacgcgggtgaggaactctccttgcgccagacgcagggcgcacatcagcagcttaagctgcccgcgcgacaaggtatcttccaccggcgctccgtcggcgcgaatgcgaaaatccgctttatgcgggccgtgggcggtgtaggttaacattctgtcgcgctcgaaattccgctccaacacctccgcgtagtcggtctctttttcccagccgcgctggaaagagaaggtgagcgtgaattccggtaaaaattgctgacaggtatccgccatgtcttcgacgatagcggcgctgtattcggcacgccagcggctgatctgctccgccagcgggattaattccagatcccaaggccgcagctgggcatagcggctgacctgacgcagcgcggcgttgcgctgcttgaccaggcgcttcaggttgctccaggcggtgaagaatccggcttcgttatgaaagcatccccagtcaaggaatgctcttctgtatttggggccgccgttgagtaaagtaaacccctccggcgtaatcagctgcatcggcatcaggtgcgccagctccgccactttgtggccgtcggtgccgtcgatacgcaccttgctgtcgccctgtttgtctttggtcaggccgatggcggtttcccgctcttcgccctgtaaacgcccatgcagaacaaacgcatcctgctcgtggcggatcacccggccaatttgcaaactgcgaaatgcccggccgtggccaagcgtatagatagcttccagcacgctggttttgccgctgccgttcgcgccaaccaggaagttaaagccgggagataaagcgagatccgcgctttcaatattgcggaagtctttgatgagcaagcgcgtcagtgacatatcagcgttctttgggccagggcgttatcggcgcagccagtttcaacgcggactgcgcgcagaccctggagcgtacacaaagtacgtgacaggggcgagcacagcccaggttgaaaatggcaagtaagatagcccgatattttccactacaatctcataggcatgacgacataggctgcggattgagaggccgcatcctcaatctgcacgctcgacaccgaatccgtcagcagaatgcgtacattctcgcacttcagcgcattcagcacatccagcacatagctaacgttgaagccaatctccatctccgttccggcgtaggtcacatccagaatctcttccgcttcttcctgttccgggttattggcggtgattttcagctggttttcgctaacgtacagtcgcacgccgcggaatttctcgttggagagaatcgccgcgcgcgcaaaagcctgcttcagaatatcgcagcccgcttcgaggtgtttatccggatttttcggcaatacgcggcgataatccgggaaacggccatcaaccagcttagaggtgaagataaaatcgccaacgtgggcgcggatattgttgctgccaatctgcacgcgcagcggggtatcgccgccgtcgagcatccgcatcagctcaatcacccctttacgcggcacgatcaccgaatggttcggcagcgacgcttccagcggcatcgaacagaccgccaggcggtgaccatcggtggccaccgtgcgcagttcgctgccttcggtttcaaacagcatgccgtttaagtagtaacgaacatcctggtgcgccatcgagaactgggtggcttcgatcagacgcttcatggtcgcctgcggcagggtaaactccacttcactctgccagtcatccagattcgggaaatcggcggcgggcagggtcgacagcgagaagcggctgcggccggaacgcaccagcatgcgatcgccttccaactgaaccgcgatctccgcgccttccggcaggccgcggcagatatcaaagaatttccgtgccggaacggtcgttgcgcccgcttcgtgcggctgaaccagcgccacgcgcgccaccatctccatttcaagatcggtaccggtcagcgacagcgcgccgtccgcgacctgaagcagcaggttaccgagaatgggcagcgtcggacgaccacctaacggaccgctcacctgttgcagcggttttaataaatgttcacgttctacggtaaatttcatagcgtcacgaggataatgttctgattaaattggaaaaatcttctttaatgtcgtggctttcttcacgcagctgctcaatcttgcggcaggcgtgcagcacggtggtatggtctcggccgccaaacgcatcgccgatttccggcaggctgtggttggtcagctctttggccagcgccatcgccatctggcgaggacgcgccaccgaacgggagcggcgtttggacagcagatccgctaccttaatcttgtagtactccgccaccgtcttttgaatattgtcgatggtgaccagtttttcctgcagcgccagcagatcgcgcagcgcttcgcgcacgaaatcgatggtgatcgcccggccggtgaagttggcgttggcgataacgcggttcagcgccccctccagctcacgcacgttcgagcgcagacgcttggcaataaagaacgccacttcgcccggcaggcggatgtcgttctcgtcggcttttttcatcaggatcgcgacgcgggtttccagctccggcggctcgatcgccaccgtcagcccccagccgaagcgggattttagacgatcctcaacgccgttgatctcttttggataacgatccgacgtcaggatgatctgctgattaccttccagaagcgcattgaaggtgtggaaaaactcttcctgggatcgttctttattggcaaagaactgaatgtcatcgatcagcagggcgtcaacggagcggtagtaacgcttaaactcttcgatggcgttgttctgcagcgctttaaccatgtcctgaacgaaacgctcggagtgcatatagaccactttcgcgttcggcttacgcgccacaatgccgttgcccaccgcgtgcagcaggtgagttttacccagacccgtcccgccatagaggaacagggggttgtaggcgccgcccgggttatccgccacctgacgcgccgccgcgcgggccagctggttagatttaccttcgacgaagttatcaaacgtgtgtttcacgttaacgttagagcggtaggtcggctccgccggcgccgggacattatcccagccagggcgcacgatcgtcggcgccgcgcgcgcggtctgcacctgcgccgccggaatggccgccgcagccgggcttaccgcccctttctgcagcgagctggcgggcttagcgcccacctcaaaacgcagctgcggggcgtccgcaccgcaaaaatcattgaggagtccattgatattattgaggtatttgtcccttacccagtcgagcacaaaacggtttggcgcatacagtgccagcgtgttatcgctcagttccgcctgcaatgggcggatccacatgctgaattctgtggctggtaactcatcctgcaatcgggcaagacactgctgccaaagcgaaagtgacacggcggactccactcgaacataaaatcgatatcaaagaaaaactgaaacaatcgtgattgttggcacacgtcgacaagaccctgcattagccgaaaagcccctgcacaaaaggggtgacgtgcgaaccgctatctgcggttattacccgctgcggatccggggatcgcgatcgggaccggggatcatagcctaaactgagaaagagatcttgtgtttctcaacagattcttcccgatttatccacaggaaggatcgaaaccgggtaagtgtaatcgatcctgcggggagtgaagcacgatttccgccgcatattggaaaaattaatgagctatgccgcttttgggcggaaacgatctaataaagatccttgcggatccttgcgctttactggccaggccgtataatcccccacccggcgcgtaatgcccgttttcgtcacgcgtctcagcttattttttgtgcgacgaggtgcgagaaataaggaaagagaattgactccggagtgtacaattattacaatccggcctctttaatcacccacgctgaggcgtaagtcgttcgaagttcgttcgggtctacgcaaaagtcagtgaatttattcaagtttaggtagaaatcgccatgaaacgcacttttcaaccgtctgtactgaagcgcaaccgttctcacggcttccgtgctcgtatggctactaaaaatggtcgtcaggttctggcacgtcgtcgtgctaaaggccgcgctcgtctgaccgtttccaagtaataaagctaaccctgcgtggttaagctcgcatttcccagggagttacgcttgttaactcccagtcatttcactttcgtcttccagcagccacaacgggctggcacgccgcaaatcaccatcctcggccgcctgaattcgctggggcatccccgcatcggtctcaccgtcgccaagaaaaacgtgaaacgcgcacatgaacgcaatcggattaaacgtctgacgcgtgaaagttttcgtttgcgtcaacatgaactcccgccaatggatttcgtggtggtggcgaaaagaggggttgccgacctcgataaccgtgctctctcggaagcgttggaaaaattatggcgccgccattgtcgcctggctcgcgggtcctgatcggcctgattcgagtttatcagcgcctgattagtccgctactcgggccgcattgtcgtttcaccccaacctgttctcaatacggaattgaggccttacgcaggtttggagtgataaaaggcagttggttgacgatgaaacgcgtattaaaatgccaccctttacaccctggtggtgacgatcccgtcccgcctggaccatttgataccagagaacactaacgatggattcgcaacgcaatcttcttatcatcgctttgttgttcgtgtctttcatgatctggcaagcctgggagcaggacaaaaatccgcagccccagcagcagaccacgcagactacgaccacagcagcgggtagcgccgccgaccagggcgtaccggccagtggccaggggaaactgattacggttaaaaccgacgtgcttgagctgactatcaacaccaacggtggcgatattgagcaggcgctgcttctggcgtatccaaaaacgctgaaatcgaccgaaccgttccagttactggaaaccacgccgcagtttgtctaccaggcgcagagcggcttaaccggccgtgacggtccggataacccggcaaacggcccgcgtccgctgtacaacgtcgataaagaggcgtttgtgctggccgatggccaggatgagctcgttatcccgctgacctacactgacaaagccggcaacgtcttcaccaaaaccttcaccctgaagcgcggtggctatgcggtgaacgtgggttacagcgtgcagaatgccagcgagaagcctctggaagtctcaaccttcggtcagctgaagcagaccgctgcgctgccgaccagtcgcgatacgcagaccggtggcctgtccacgatgcatactttccgtggcgccgcgttctccactgcggattcgaaatacgagaaatataaattcgataccattctggataacgaaaacctgaacgtcagcaccaaaaacggttgggttgccatgctgcagcagtacttcaccaccgcatgggtgccgcggaataacgggacgaataacttctacaccgccaacctcggcaacggcgttgtcgctattggctacaaatcgcagccggtactggtgcagccaggccagaccgacaaactgcagagcacgctgtgggtcggcccggctattcaggacaaaatggctgccgttgcgccgcacctggatctgaccgtcgactacggctggctgtggttcatctcccaaccgctgttcaagctgctgaaattcatccacagcttcctcggcaactggggcttctcgatcatcgttatcacctttatcgttcgtggcatcatgtacccgctgaccaaagcgcagtacacctccatggcgaagatgcgcatgctgcagccgaagattcaggccatgcgtgagcgtctgggcgacgataaacaacgtcaaagccaggagatgatggcgctgtataaagcggaaaaagtaaacccgctgggcggctgcttcccgctgattattcagatgccgatcttccttgcgctgtactacatgctgagcgcctcggttgaactgcgtcatgcgccgtttatcctgtggatccacgacctgtctgctcaggacccgtactacatcctgccgatcatcatgggcgcgaccatgttcttcatccagaagatgtcgccgaccaccgtgaccgacccgatgcagcagaagatcatgacctttatgccggtcatcttcacggtgttcttcctgtggttcccgtctggcctggtggtgtactacatcgtcagcaacctggtcaccattattcagcagcagctgatttaccgtggtctggagaaacgtggcctgcatagccgcgagaagaagaaatcctgatactcttcattcttcaagccgcagatgcgttggcttcattagttcgccccagtcacttactacagtaagctcctggggcctcactaacttgccgcctttctgcaacttgaattatttcgagtatctacggtagcgttaatgccagagaaggcggtcaatggaccgccttttttacatctacatagagagtcaccatgagccataacgacactatcgtcgcccaggcaacccctccgggacgcgggggtgtgggcatcctgcgtatctccggccttaaggcgcgcgacgtcgcgcaggcggtgctgggcaagctgccgaagccgcgctatgccgactacctgccgttcaacgacgttgacggtaccccgctggatcaggggattgcgctgtggttccccgggccgaactcctttaccggggaagatgtgcttgagctgcagggccacggcggcccggtcattctcgacctgctgcttaaacgtattctgaccctgccgggcctgcgcatcgccaggccgggtgagttttccgagcgcgcgttcctcaacgacaagctcgatctggcgcaggcagaggccatcgccgaccttatcgacgccagttcagagcaggcggcgcgctcggcgctgaattcgctgcagggggcgttctccgcgcgggtgaatcatcttgtggaagcgctcactcacctgcgcatctacgtggaagcggccattgacttcccggatgaagaaattgatttcctctccgatggcaaaattgaagcccagctgaacgaggtgatggccgatctcgacgccgtccgcgcggaagctcgtcagggcagcctgctgcgcgaagggatgaaagtggtgatcgccgggcggccaaatgccggtaaatcaagcctgctgaacgccctggcgggccgcgaagcggcgatcgtcaccgatatcgccggtaccacccgcgacgtgctacgcgagcatatccatatcgacggcatgccgctgcatatcatcgataccgcaggcctgcgcgatgctaatgacgaagtggaacgtatcggcatcgagcgcgcctggcaggagattgcccaggccgatcgggtgctgtttatggtcgatggcaccaccaccagcgccgttgacccggcggagatctggccagactttatcgagcgcctgcccgctaaattgccgattaccgtggtgcgcaataaagccgatgtcaccggcgaagcgctcggtatcagcgaagtaaatggccactcacttattcgcctgtcggcacgtaccggcgacggcgtggaggtgctacgtaaccacctcaagcagagcatgggcttcgataccaatatggaaggcggcttcctcgcccgccgccgtcacctgcaggccctggaagaggcggcgaaccatctgcagcaaggcaaagcccagctgctgggcgcctgggccggcgagctgctggcggaagagctgcgcctggcgcagcaggcgctgagcgagatcaccggggagttcacttccgacgatctgctgggccgcatcttctccagcttctgtatcggcaaataacgtttagtccgtaaacgttcactcacccgcattaacgccgcgttaatgcgggtttttactttccatactcgtccatagtcgtgcggttcatccgcgatttttatgtcctgaattgtgcccatctttaaatcccccgtgtgccattgtttatttttttgagctaaaaatcactcaaatggacacaaaaaacggtaaaaaaacactcaaacatgccttctcatggacacactgtagaggtgagatatggcactttcagataccaaactacgcacacttactcccagaaaccgcccctggcaacttgccgatcatgacgggttggtgattgaagttcttcccaccggacgaaaaatctggcgtttccgctaccgctttgacaacaaatcgcaaaagctcacgcagggcgaatacccggctttctcacttgcagaagcgcggctttggcgtgaaaagtgtcgctcaatggttgcccatggcatcaatcccgcgcagaaaaagcagaaagaaaagcttaaacagaaagacccaacgacagtcaaaacattcgccaaacgctggctgaccgatatcgttgaaaaaagtaaccgcgatccgcgcaacatcactcgcattatcgagaaggacatcattcccatcatcgggaagctggaactcgaagaactcacaactgctcacattcaggtcgtgctcgaccgcatcaaccaacgaggtttggatcacgtcgcgctactgacgcgaaacgtgcttaaactcatgctggcctatgcgatttccaggggaatcatcttcaacaatccggcagccgctatcgaggcccgttatatcgcacaagcaacaagccgcgacgtggcgttaacagcagaagagatcggcatcctgttacgggggatctacacctctaatatgaaacgacgccacaaactggctctgcaactgctgatcatctgcatggtgcgtaaatctgagatgattgaagcgacatggagtgaagttaactttaacgcgctggaatggcgtatccccggcgaaagaatgaagatggataacccgcatattgttccgctgtcaaagcaggcgctggcgatgttcgaagagctaaaatttcttgccggagattccccttacgtcttccccagccgaaacgaccaccgacgcccgatctccaaaacaacgcttaactgcgcggtgcgtacgttggatctgaacgtcagggattttgttattcatgacttccggcgtactgccagcacattgctgcatgagcagggctacaactcaggctgagtggagaaatgcctgacgcataagatcagcggcgatcgtggtgtctacaaccgcgcggagtacctgaatcagcgccgggagatgcttcagtccagggctgattttgttgatgcgcagtttgaggagggacggaaggtggttatcgggaagtttgggaaggcttatgaaatcactaccaattgacgcatcaaaatcaaattaacaacttagtaacgtataaagaatagttccggcaaatgccggaactatcgatgatataataaatgcctacgcagcgtttagttcattcagtatctcaatgaacttctcatccagctccctccactcttcattacttaacattttatccttgtaagcatgatgagtgagatacagtaaggtttcggtgactccgccatgtttcttaattaagccatctagttttttctgagctttcaaggcttcggttttaaccaaggctctccgcttctcctgaaaaacggcttcaggctcagaaagaatctgagagatagtgtccttgtccattacatagaatgtttgagttgttgcactccgcgctgtaaccgatgtcgtaataacattacagtgctgaacaggaatgaagtatttcttctcaagaatctcaatgatcgctgggagtcgagtcacttcaaaatcagccgtgatattgtttccagcagaagtcaaacggtcaccccgaagaagtgagcacaaaacaacaatctgtgaattcttcatacgattgagcatcaccaaaactgttgggtgagccgaaaattttaacgcaagctcattacgagcgaccgcaggaggaatggttaagtgttccataaaaagcctcttatctattgatatctaaacaataagacgcagaagggaaccacaggaaacactattggtagcagctacgttcggtcaaaaaaaaccaaaaaagctggatacggtgcgcggatatgcataatattatgcacagccaattgcacgccaacagtgcaacactggttactgtaggcggagatcagaaagagtcgccaaactttagatctgatcttcgccttttccttttgctgtcttcctactcatcacccaacttgaagataatttgtcctttctccatctgagtgtctgaatcctgtgaaaactgcttaaccgatgcatcatcatcatcagacagacgaggaaaccctggccgtagtgtgattctgattgcacaggatgaatactcacctgctttattcttttgtcctgcaactccaaaaccaccctccgggattttttttatcatccacaatgatgattcactgtcgtaaaggatatcaacacggtcacctgtttcgataccagttgcatccatggcagtgcgaccaattctgaatcccagttcaacagcaccagtggcgcgtttagtttgagtaacagtaacgtggttgctttgtaccatacggccagttttcgcagccatcgttgatagagatacgaaagccataacaacctccagagatattcaagtgatcgcattgtacgatcgatcagattgtaatcacaacaatttttttatttgtttttactcccttcaatcacaaccaacgaccaactaaatttagataactcaattcttattgttcttcgctttgcggcatatcataccacacagttttatgcgttagtttcctggatccgtaagatactaaaaaatttcgctctctagcgataaatgatggaatcctctgacggcaaagtttttgttgaaagtgagataacttaacttttgttatgcatacattgtaagtggacacttaccaacatttttggttggtgatatcgtaaaatttacttcgacttaaagaagtaacccccgcaaccgttagatttgaacttcattttcataacaaagttacttcttggctcaactaggaaaaattttcaaatccaaaaacagtttcccgcagcttaccccctccccccgctctaccctatccccaactcatagcagtacccctaaaagcttcctgttctaagacgaactgcgacctgtaagaagcgcctttggcggtcagcccccggtcaaccaaggaacgaagcgtggtctgaaactgacctcctgtctcgatacaggtgaccacaccctttatcgctaccctgttgcaagcgtagcgacagacagaacgctgtagagaagtcggacggcattgccgaaggctttgcgtccgtacttcctgctgaatgtgcaaaacgcggcgccacttttaagagcgtaagcgagtgaaagtgacgccagcgcgcagatcagcttcaacccagctactgcctgcaaatccactgcaacaaacaggctgacactcaaacagatgtcagaaattcacttaccaggaggagaaaccagcactaccgaaccgataccggaggacaggtcattttacctgtggggatatacctgcctgagcaggcggctgcattcgtgcatcaccgtaccccgtcatacctcatccgcgcattctccggcgcaccggtatcgttcagcacagcacgctgtgcccaaccgcgcgtcggggaattgagtggagaatagctatgtcgaaacttacaaaacgcatggaaaaactcgccctgctggctggcggcagttttaaaacagtccatgatcccctccgcatcgccgggcgtttaagccagcatctgcacaagctgaatatccagattcaggatctccagcatctgaaatcgtcacatatcgaaagctacgtgatggcgcgacgggaagcaggcattacgccacgcacgctacaaaacgagatggccgccctgcgcaccatccttgctcagtctggacgtccaaaatttgcccaatcggagcgcatcagcaataaagcgctcgggctgggtaacgccagccgggcaggaacgcatctgccattaacctcagaacgctggttgtcggcgctgtctgctcttcatgaaaaagatgaagggctggctctgacgctggagcttgccagagcaatgggtttgcgttcacaggaagcggtgcagtgttgtcagtctctgaagacttgggccgctgcgttagagcgtggagaaaaccgattgcaggtggtttttggcaccaaaggatcacgttcccgtcagacggtggagctcgaacctgaaaggctacgcaacatcctgaaccgggctatacccctagtggcacaacgcgggggacatttgctcaataaacccgatctgcgcgccgcaatgaattactggcgtgccagcgcagttcgcgcagggctgactggcccctatgcaccacacagtctgcgctattcatgggcgcaggaggcgatggcgcactaccagcgacaggggctgagtataaaggaagccagggcgatggttgcgatggttcttggtcatggcgatggtcgagggcgctacatccagcaggtgtatgggaggcaatcatgagctattacgtttctgccgtctccgatcgggcacgcaataactggccgaaaatatttgaacaacttggcattttcattccaccaaatcatcggcatggcccgtgtccctgttgtgggggtaaggatcgcttcaggatggatgatctggaggggcgcggcacatggttctgcaatcagtgcggcgcaggtgacggactggatctggtttcccgcttcttcggttgcgcactggttgcggccgccgaaatggtgcaggacatggatcctgtaccgctggttccgccagccagggaaaaatcacaggctttgaatatggaatcgcgtattaagacactgcttcgtcattgcgaatccggagaagcgccgtatctgacaacgcgaggctggcgacgagcccagtggcttctgactgagcgtagtagccggacaatctgcggcgtacatttcggggcgggtacgctggtattgctaattcgaaatacaggcgcgcagctgacaggtgcgcagttcattcatcctggagggaaaaagtacctgctgcccggtagccatctgaaggattgtttttgcccgctacatcaggcgagccgcaacggtagaccggaaccctggacattggacaacaaaccaccggaaggcatcatcattaccgaaggatatgcaaccgcgcttgcggtcttatgccttcatcattttccggtcattgctgacctgtcggcacacaacctgaaaaatgtggccatcgctttccgggcgtagtggcctgaatgccaccttatcctggctggcgataatgattgcagtcaggagaaaaataccgggttgctgaatgcaaccgccgctgccgaggtagtgaagggctgtgtggttctccctgcagacaccacattgagcgactgggatgaattttaccgtcactacggtgaatccatttcccggattgtgttcaaccagcagcttcctgcaaatctcaggtcgtagtcatgacagcatcagaccgtactcttaccacctcccttccgctgcgccggggctcggaagggtttaacacgagtcaggatctggttaaaggacttatgcccgccggggcgctgtgcagtatttacggccccggcggctcttttaaatcctttctgcggtatcgctggcgtgccacattgccagcggtacgtcatggggcggaaggcgagtcaatcaaggggctgtgctgtttatcgccggagaaggaggaaccggtgtatcgcggaggatccgcgcctgggaactcagcgttaatgacgagatggcgctcgataacctgtttcgcgtcgactgcccgatctttccagccgctccgggaagcatcgaacaggttatcctggcgacgcaggacattaagaacatgaccggaatgccggtacggctgatcatcctcgatacgctggcccgctgttttggtaattcagatgaaaacaccgcgcgggatatgggcgcatttatccagggttgcgacgccatttgttatcatacgcgcgcagcaatgatgatcgttcatcactcgggtaaggatcaggaacggggcgcacgcggttcaagtgcttttcaggctgcgctggatgccgagtttaacgtcaggcgcgagggacgtcgcaacgctatcaccctgagttgtacaaagatgaaagatgcggagatgccggaggtcaccgcctacgatcttgaggaagttgttatctataccgatagcgatggcgaaccagtgacctcactggtgctgaatgacgagccccggcaacctgacgatgacttactgagtagtggcataccacccggcgtccctcatatcacccgcaaccatacggcgctatggcgctgtattaaccaacgcatcagccagaataagccctgtacctgcacgctcttgcgcgacgatctatgggctaagggaattaacgtcgagaagaaattttcgcgctggctggagaagctgctgcgcgagcaattgattgtgctcgatggagaacagatccggctcccggatacgggggaatgatggtagaactcggaatatgtggggggatacactgccaagtactcgactccccccacattattcacatttaacagcgaaagatgggggatgccctttcaacccgcgccattactgtgaccatggaattcacctcagagaatatgggggagccagccaggaaaagcaggtgggggaaccaaccacaacatctgtccctgatgctgtggtcgctgtaagaattactgaggtaatttctcgtctctaagccgtctgatctcatcctcttcaaaagcatcccttaatagttgtagctggtcggcaaggatgagaagcaacgcataattcgggccgatatcgtcaggatgctcaagcatcacatgcaccaggactcgcgagcgatcgaccagttctctggctgagggttgttctacggtgattttcatagatacctccggcggaggctggtgcaacaggagaatcagagacaggacgcgccagtagcactgcaaacatcgctaccgacactcgagataattcggaacgccaattccggctgcggttttgccgcaacgtggggactatagcgcaagtcagcacgcaaaaactatgcttatcacctcatattaagggcgattttatgcgcgccgcataaacaatgcgacataactttttttcatctttagaggtacgaacagatgctaatttgaaattgatatgctgtataattaaccagttaggtcaagttgataacttctgagaccactctgattaaaacaaagaaccagtcagtaggcacattccaaaggagccttccattatgcgcgtcaccgcaactcatctagtccagtggtcagacaagcgtgaagcacaaggaatgcttccaatcctggtaaggcggcttatatctgttacatcacgtattacagccattaccatgccaggtggtgattcggtgaatgttcctggctgggatggtgttgtcgatgttgcgcaaggaaatccctgggttccagatgggctcagctactgggagctaggcacctcaaaagatccggcatccaaagccaacagcgattttgagaaacgtctggaacagatttcatctgctcaaaaatcacaagcaacctttgtttttgtaactcctcgtcgctggccaggcaaaagtacttggcaggaacaggcaaggaaaaaaaatgcctgggcggatgtactagtttgggatgcagatgatctggaagcatggctggaaacctctccagcgaccagtttatggctaggcatgcagcttgatattgccggtcatggcattgaagcagtagaaaactactgggagcactggaaaaatcaatcctgccccgcaattactgcacctgcgctatttcatggtagagagcagtcaaagcttacgttacaaaacaatattaatcagcatgacccgttgataactgtaatggctgacagtcagtccgaagcagttgctttcgtttgcgcattgttgattgaagaaggccatttcttacgtgctgcctgtataacttcagaacaaggatggcagttcattgatgctaatcccggcattgaattggtggtcattaccaataaccagttgagcaagagacgagccccacgcgaaggtatgagcttaatagtaccgatggcatttggagaccaggccttcaatctcatgggaattgggtgccaagcaatagatcagaaaatagtggaacttagacgtccacaacctgaagagtttgaaaaatccctttgcgagcttgggatcgcatcctctgatgccgcacggtatacccactcactgggaaggtcatggacggtttttcgtcgatggcatgcgcaaaatcctgtgttcaaaaaaccagattggattgaaggtgccaacgccaaaaatttattgctacttaccctcgtgggtgcttggaatagcgactccgaaggggacagggcttgtgttgagcagattgccaaccgcacctacgaagacattgaaaatgagctattaagtttagctgcgcttgatgatgcaccagtcgtaaaaataggttctctctggaaagcgaaagcgccaatggagctattacatctaatggcccccaaactaacgaacaccattctggcaagattctttcaggtagctcgagctgtatttgaacaaccagatcctgtgctggaactggaagaggacaaacgatggatggcctcaatctatggcaaagttcgcgaacaatccggtgttgttttggaggcaatggcggaatcaattgccaaactcggctatttttcagacaattttcagcatgttgttattggcaattctgtacgaggctttattactcaactcctggaagatgccaatgaagaacgttggctctccgtttcattctttcttcgagcgctagcagaagcggctcctgatgagtttctgaacgccgttcaaaacagtttgcatagccctgataaaccagtcactcgcctgattaaggaaacaacatcatcaggtatatcaggccgctgctggcatgccagcctactttgggctttggaattgctggcatggtatcccgccagactcggacgagttgcgagtatccttgcggaactatcaaatatagaaataaaggggaattggggtaatacaccatttaataccctggtttccttttttcgctcttggtatccacaaacagccgcgtccgtcgatataagactccgagcgctcagaaatgtcgtcgacaaatatcccgaagtagcctggaaacttttgttggccctactacccaaccgacatgatatggtttcacccaatgcaaaacctcgctggcgtgacgatgatgcgggtactaacgagagcatcacctatggtgagattcaacgattcatactacctgttgctgatttattgttagagaaagctcaggacaatgcccaacatatcgctgatcttgtcccgaaaataaatgatatggataccaatttcagagaaaaggtaatagaactggtaggtaaagctacaactttacccgatgatcagcgagaaacagttcgcactgccgtcagacaatttctgaactgggaaaactcttttaaccaagacggtgataaacacgatcgatattcagctgatgtgttgagaccattttttgacaagctagctgcggatgatctggtagtcaggcattcatggattttctccaatggatggattgaactcccagacgggcatgaagaagatcatgaaaaagcgaacaagacaagaaatgcattgcgcaccttcgcccttcgagaaatattccaagcattgggttggtctggtattcatagactagctaaacgttgtggagatccgcgacttgttggctgggagcttattaaagaaccattcgaacgtgaagaaatggcggaatggctgtgtcaatggtatctggaggcatcacagggttcatcgttatatgattcactgaccagcggtgtacttcatgcgctacctcaagcagaactccttgatttcctcgatacatgcttatctcaactcgagcaaaaatccgcctcttccgaaaagatggctggtttcatggtaaatgctccgcaaggaatgagcttgtggcaacttattgaaaatcaatatcaaatgcttctcgatcatttctggttgaatgttcgaccgtcttatttgcagtcgaataaggagcaattgctcttttgcatcgaaaaactacttgccgcaggaaggccgcgaacagctataaatgctatgggagatcgttctagcgacttaccaggggagtcgctaatcctgattctaaaaggcatcgctgctggccaagaagaagatgccgaattcccgcgttcatggcacatttctcgtatattcaaggcgcttactgacgcaggatacaatcctgcagaaatggtaagtctggagttcatttactatccactacttaaaagagacgaatatggcgcaccatatttaatggctgaaatactgggtaatccggatttttttatagagctcatctgtctcgcttacaaacctcataatacagcacgcgaacctttacctgagcatctacaaacagcagctcgaacagccagtagtctactccacgaagaacacggcgttcccggtatggaccacaatggagaaataaatagtgaattatttttctcatggatcaacagagttcgagagttggcaaaagaaaacgatcgggaggttgtcacggacctgactatgggagcctggttttctgactggcctttaaataaaaatgttgaatgttggccacacccaatcattgccgatttattggatcaggatgaatgcaaagacattaggcgaggtttcaaaaccggagttcataacactcgaggtgtcactacccgtatgctatatgacggtggaacgcaagaacgacaggtttcggaaaaattcagatatttagcgaaccattggaaggatactaaacctaacgttgccatcatgatcgaagctcttgcaaaatcttacgagtatgaagcgcagatgcatgatgaagatggtttatggaatcaagaatcatgaaaatccaaactaaacaaatgattactgaaaaaaaacgatctatcagtagaacatctgaatggggttaaaaagagtattgcgttgtgtaacaagcgaactttctgcagtaacactaggcagaagtactggttattcattatatacttttgtgtccttgaatgtgcccatagccatggtttcaaggcaatgtatcgctgatagattatcgagttagttcgattttccagcttctgtatcggtccgtaaacgttcactcccccgcattaacgccgcgttaatacgggttttttcttgccctttgcggcgcaacgttctctacttttatctccccctctgccgcgagactaaaacatgaccgttgaatataccgtgatcgagaaggtgccctccgccgaagcgttttgccacctgcgggtagccgccggcatgtcgccgcgccccctggaaggcgccagagccggactgccgcatagctgttatggcgtacatatcctctggcaggagacgccgatcgcgatgggacgcatcgtcggcgacggcgcgattaatttcgatattgtcgacgtcgccgtcgatccggctcaccagggaaaaggccttggccggctggtgatggagaagctggtcgcctggctggacgctaacgcctttgatggcgcctacgttacgctggtggcggatgtgccggaactgtacgcgaagttcggcttcgaaagcgttcgcccggagagcgaggggatggcccgcgtctggcgaacccgcagtcgttagctcgcatttcctgccaggaaaagagcgttgtccaaatggcaactcgtcttacggcgcgttcctcactatgctgaacgccattcacatcgcgaggatcccatgacacgctttcttctctgcagctttgccctggttctgctctacccctccggcatcgatatgtatctggtcggcctgccgcgtattgctcaggacctgggggccagcgaggcgcaattacatatcgccttctcggtctatctggccggtatggcctctgcgatgctgtttgctggccgcatcgccgaccgctcggggcgtaagcctgtcgctattgtaggtgcagcgatctttgttatcgcctccctgatctgcgcccaggtgcataccagcagccacttcctcatcggacgctttatccaggggatcgccgccggcagctgctacgtggtggctttcgctatcctgcgcgatacgctggacgaccgtcgccgcgccaaggtgctgtcgttgctcaacggcatcacctgcattatccccgtcctggcgccggtgcttggccacctgattatgctgaaatatccgtggcagagcctgttctacacgatgaccggcatgggcgtcatggtcgctgtgctgtcggtctttatcctgcgtgaaacgcggccgacggcgcctccgcaggcagcgttaccgcagcatgacgctggcgaatcgctgttgaaccgctttttcctcagccgcttactcattaccaccctcagcgtgacggtgatcctgacctacgttaacgtctcgccggtactaatgatggaagagatggggttcgaccggggaacttactcaatggcgatggctctgatggcgatgatcagcatggcggtctccttctcaacgccgttcgtcctgtcgctgtttaacccccgcaccttaatgctgacctcacaggtgctgtttctggcggcaggcgtgacgctgagcctcgccactcgccaggccgtcaccctgatcgggctgggcatgatttgcgccggcttctccgttgggttcggcgtcgcgatgagccaggcgctggggccgttcacgctgcgcgcgggcgtcgccagctcggtcctcggcatcgcgcaggtgtgcggttcatcgctgtggatttggctcgccgccatcatcggactcagcgcaatgaatatgctgatcgggatactcattgcctgtagcatagtgagccttgttttgttactggtcgttaccccgccgcgggttgcgcaatacgatgaagaagccgctgtcgagtcttgatcttaatttactcctctgcctgcagctcctgacccaggagctcagcgttacccgtacggcgaagcggatgaacgtttcgccgtcagcggtgagcaagtcgctggccaaactgcgcgcctggtttgacgatccgctgtttgtgaaaaccccgctgggcctggcgcccacgccgctggtcagcagcatggagcaggatctggcggactggatgcagatgggcaaccaaatcctcgataaaccgcaccataccatgcccagcggcctcaaattcgaactggcggcggaagcgccgctgctgatgatcctgtttaacaccctctctcagcgcatctatcagcgctatccgcaggcattgattcgtttgcgcaactgggactacgactccctggacgccatcatccgcggtgaggtggatatcggcttctgcggacgcgaaagccatccgcagtcgcgtgagctgctgagcctactgccgtggtatatcgattttgatgtgctgttcaccgacctgccgcaggtctggctgcgcgccgatcatccggcgctcagggaagagtgggatctggcggcattcttacgctatccgcatatcactatctgctgggaacaacgcgatacctgggccctggacgacgtgctgcaggagctggggtataagcgtaacgtggcgctgaccgtgccggggtttgagcaatcactttttatggccgctcagccgcagcacaccatgctggccaccgcgccgcgctactgtcagcactataatcagcagcaccagctgccgctcgtctcccggccgctccccctggaggcgcagcatctggaaaagctgcgcgttcccttcaccctgctatggcataagcgcaacagctacaacccgaagcttgtctggcttagagatacgctgaaagcgctctattccggtacgctttaagccttgtttcgtgcccatagcaccttatttgcgcaagaatttgtaaaattcaaacaaattcccttttcaatgggggatttcggcattaaaacctgttaataccaggcgataatagcgcccgcagttttatccagaccattactcacggagcgacgtatggcaacgcattttgcaagagggatactcagtaccggggagccgctatcgacacgtttgtcagcggcctgtcatcaatccgcacgtcttctcccgacatatcgccaggctcgcttttgcgcgtcgcgctcgctgcttgccgagctgctgtttatgctttacggcatcagcgagctgcctgaaatcatcaacgaagccaatggccgaccggtttttagcgatcgccaactcccccgcttttcgatcgcttatactggcaatatcgttggtgttgccctcaccaccgagggggattgtggcctcgacatggaactgcagcgcactgtccgcagccacgacgccgaccggcacaatttcagcaacaatgagaatctgtggattaacatacagcatgatccggacgaagcgcgcagccagctggtagcgctgcgccgcagcgtgctaaagctgaccggcgaagcatcaacgcagctgcagctgctgcccggctctggccgcctgcgcaccgccggcagtcagccaatcgaagcggtatgtgacgccgaatcgctgctggtatggtccattgccgcaaccccgaacatcggctcgctgaaggtctgggaatatgatgctaagggaggtgactggcgcagcctggcggatgcgcagcagcgcgcacgcgaaccgtcagcccgcctgatgcgctttaccagcttacccatggaaaaaaccttatccctcaattgaccggtcttgccggcatcatgatccaaaggagcaatcatgtcagataccttgaaagtggttacgttactcggcagcctgcgtaaagggtcgtttaatggaatggtcgcgcgcaccctgcccggcatcgcgccagcgggcatggatatctccgcgctgccgtcgatcggtgatatcccgctgtacgatgctgatatgcaggaggaagaaggttttccgcagcgcgtgcaggagattgcgcaacagatccgcgaggcggatggggtagtgatagtcactccagaatataactattccgtgcctggcggcctgaaaaacgccatcgactggctgtcacgcctgcccgagcagccgctgtccggcaaaccggtactgattcagaccagctcaatgggcgccatcggcggtgcgcgctgccagtatcatctgcggcagattctggtcttccttgatgcgatggtaatgaataaaccggaatttatgggcggcgtcatccagaacaaagtggatccgcaggcgggtgaagtggtcgatcaaagcaccctcgaccatctgcgcggccaactgaccgctttcggcgactatattcggcgggttaaagcataaaaaaagcccggcagcgatgccgggctttttcatcatgcgtgcggattaatgtgcatcgataaagacaattttcagcacgaacagcagcgaaacgataatcacacacgggctgagctcgcgcagccggccggtaccgatcttcatcacgcagtaagagataaagcccagggcgataccttcggtgatcgagaagctaaacggcatcatcactgcggtgatgaacgcaggcaccgcctcggtcaggtcgctccacttcacgcgcgcgaggctggaggtcatcagcacgccaacgtatatcagcgcgcccgcggcggcatagccaggaaccatccccgccagcggagagaggaaaataaccagcaggaacaggataccaacgacaacggcggtcaggccggtacgcccgcccacggaaacgccggaagaagattcgatataggccgtcaccgacgaggtaccgatgaaggagcccgccaccgacgagacgctatcgacaaacagcgcttgcttcatgcgcgggaatttaccgttggcatccgcgagacccgctttatccgtcacgccaatcagcgtcccggaggagtcaaacaggttgaccagcataaaggagaagatcacgccggccaggcccaggttcagggagcccgccagatcgacctgaccaatcaccgaagccacgctcggcggcgccgagacgatcccggtgtaatgcacgtcgcccagcatccagcccagcagggtggtcacaacgatagagaccagtaccgcggcgtgaatgttgcgcgacgccagaatcgcgatgataaagaagcccagcacgcccagcagtacgctgtgggaagtcaaatgaccaatgctgaccagcgtttccggattggcgacaatcaccccggcgtttttcaggcccatcatgccgataaacaggccgataccgctggtgatacctacacgcaggctaagcggaatattggcgatcatccagtaacgtacgcggaagatggtcagcagcagcaggcccacggcgccccagaagatggcacccatgcccacctgccacggcagccccatcgcctgcaccaccacaaaggcgaaaaaggcgttcaggcccatcgccggcgccagggcgaccggcaggttcgcgaacagacccatcaggatactgccgaaagcggcaatcagacaggtggtcacaaacacggcgctggtatccatgcccgctacgccaagaatttgtgggttaacaaaaacgatatacaccatcgtcaggaacgtggtgaaaccggcgatggcttcggtgcgcaccgtggtgccgtgctcgcgcagcttaaatacgcgctccagcagaccctcgccagaagactggctggtttgttgttgactcattatcggtttccgaacgtaaggagggaaaattcgaggctatcctataccaaattacggcaccaggcgcggttgtatggtaatttttttcatttattttgcttatacggcaacgattgcgtcgcggcattgagcattacgaaaacgttaaacttgttaatatggaaaggctatgactcaaccagaagcagtattttttgactgtgacggcacgctggtcgacagcgaggtgatttgctcccgcgcctacgttcacatgtttcaggaattcggcattacgctggacctcgccgagatttttaagcgcttcaaaggtgtgaagctgtacgaaattatcgacaccatcaacgctgagtatggcgttaatctgcaaaaggccaccctggagccgatttaccgggcggaggtcgctcgcctgttcgatagcgagctggaggtgattcccggagcccaggcgctgctggatgcggtaagcgtcccgatgtgcgtggtttccaatggcccagtcagtaagatgcagcactcgctcggacgcaccggcctgctgcgccatttcactgaccgcttgtacagcggctacgatattcagcgctggaagcccgacccggcgctgatgtttcatgcggcagaggccatgcaggtaaaagccgaaaactgtattctggtggatgactccagcgccggcgctcagtcggggattgccgccggcatggaagtgttttatttctgcgccgatccgcacaaccagccgatcgatcatcccaaagtgacgacctttaccgatctggcagagctgccggcattgtggcaggcgcgcggctgggatatcacgcgttaagggcctggtgagcggcacgttggcattgatgaacccccgctatgcgtctgcgtaagcggggaatagaactagcggctttttattgctgcaactccgccgccgccgctttatcggcaataatcaccagtgaagggtgcaatttgagcactgaagccggcacctgcacgctgaccggaccttccaccacttgctttaacgcgtgcgcttttgccgcaccgctgacaattagcaataaatttttcgccgccatcacgcttctcggccccatggtgacatagctgtctggtactgccgagatatccccgcccatctcgctgttagcgataagagcaatcatttccccatgaatcggcacttcgaccgtctgatcatgaaagcgggtggtattcggcaggttgccgcaaaaatggccgtcggcccccagccccagcaccatcagatccagaccgccagcctcttccagctggcgatcgtgctgagcggcgttgtccagcgtcagcttgtgaatgttctcttctttgatctgcgccggggtaaaaaacagctggcgcaaattagatatcgtgacgccttctcgcgactggccgcgaaaagggatctcatcgaagttgtaatagtgcacccgatcatagaatgctttgcctttcacggcggcggtcaaatgctcatacatccgctttggcgtgctccccgccgtcaccgccagattcacccgccgcggcgccgtgatatagcccagaacataatggctggcgaccaggctcatctcttcataatcttcggtcacaatcattttcatcttgtcgtccttcacaagcacaaaacgggggctgaaggccccctaaaggttatttaaacagtttttgcacaaactcggcgtaggccgggcgccagacgtccatttcatggttcaggccgggatactggtagtaatcaaatttaatctgctgtttttccagctcgcttttcagaccagcaatgtctttaccggtcacagaatctttttccccgacgaccacggtaaagttacgcagctgcttattgatcgcgtcaggctgcttcagctgcgcttccacgccggcattcggcaccgtggtagtcgtaacgccgctaaaggtggcgagccagccaaagctctccagatgattcattccggaaaccagcgcctgataaccgccctgcgagaggcccgccagcgcccgaccgtcggcatctttacgcacgttaaatcgggcatctatcagcggaataatatcctgcatgagctctttatccgccgcctgcgcattaagtggatagaaggttttgcgccgctcctgcggcgggaagttttccgcgaccgcttccgggatatcggtttcggtatccgggaccaccaccagcatcggcttaatcttgccctccgccagcaggttatccatgatttgcgggatccgcccctgatcgatggccgacaggccgctgtcgccaaagccatgatagaaatagagcaccggcagcggatcgccggttccgctatagcccggcggcgtccagacatagagacgacgttcggcgttcagagccttcgagtgataggtgagggtgcgcagatcgccatgcgcaacctcccgatcgtcaagaatactgcccggcaccagaatcaaactggtgttcacctggcgctgcggcttctgatagcggctgccggtatctaccgagcggaagccatccacatcgaaatagtattcatagagattgggcttcatcggctcgcttttccatgtccagactccgtccgctgccttggtcatgtcgtgcgagacaaaggagtccggcgtggcgccagtcactatcgagacccgccgggcatcaggggcaaacaagcggtaggtgatactcttatccgcgttaacctgggtgataaagtggctcaccggcaggcttgggtccggcatcgcgggtaatggcgccgcctggagggtaaacgccgcgcccgccagcgccagggcgaaataaattgcatgtcgtttcatcgttgttcctctttcgttgtgtccgttcagttatcgtctcaccaccagatttccgcctgcgcccccacggcaaactgatcgttcttcccgtcttcaaaaatgctggtggtattattcgcggccttatccaggtcaatatccttcgctttaatataggtggcatagaaacgaatttccgggcgcgaggtcagcatactggtattgactttgaaggtatggaacagcgtggtcttgtagccggactcgttatatttcttgccggtaacatctttgttttgctgtttgaagtaccccagctcgacgccggtctggttatatttatcccagatataagccggtcgcagaaccgtacggatagattcaaaatcggagtgggccccggtttcgtagctatagacgtcgttaccaaaagagtagacgatggcattcgccataataacgtcatcgcgtaaataggtttccccctgcgaggttaagcgcacggcggtgccattggtatgatcgccataatagcggccattaaaggtggtataggggctggatccggcatagcgtgagaagctgctggcaatagagttattggccagtaagaaagagaattcgttaaagccgccgttagcaaatttctgcgttaacgaggtaccagccatccaggtatctttccacggataataaccttcattgccctctttatatttctcagaggaactttggttggcggcgacatagcgtccgctaaccatcaggctggctttatcccacagcggaatctctttgtagcgaacgtccagggtgttggtgttaatttgctgcttattgcttaaagaacggtcataatcatcgacatcttcgcgaatcaacgcgatatcgaatttcccggcgcccacctgccagttttccagccctacgccggccgccgcatcggttctctgcgttttccagtccagcatctggatttcaatttttggcgccccgtgtttgccgacccagaaatcggcttccggcgcaaacggcaggaaccctttggtgttaacatacatatccgagaattgaatgtagttttcgccgccggcattgtcaccaaaccagccagtggaatactgctggccgacgttcccgtcgagcatcacgatggcgtcgacgcgtttatcgccttcctgaaacacccgctgcttcagctgcagatcgaaccagccggaatattcattgcccaggcggccaagcgaaccgatcgcccatgattttggcgagccgtgcgaggcggtcccccagccggaacggaagtagccgttatagctaaagccaatttcatctttcacgaacttgctaaagtctttcagcgtcatcgcgctgtaggctggcgcgccatcggtgacaggttgttgatttttaaccagcaccgcatccggtttaaccgccgttttcggcccggcggtcgcccccccggtcttgcgcttctgaccttccgcaggaggagaccatgaggcccaaatctggtctctttttctttcctggtcctgatattttttgagctctttttgcgtgtctttgagcgctttttccagcagctcaagccgttgttccaccgtcaactggctcgctagcagattagttgaataacaaagtggcgccagcaagactatcgccgaagcgatcctgttttttctcatcataatattcccttatataatcattggcgtaaataaaacacgacaacaaccctattccgtgccggtgctaatagccgtatccataccgtttgacgtcgcggcggctgttatttttgcggttagacaaaaacaaaaaaacctgaagaagaccatctgccttggcagataatcctcttcaggttttgcccgcgcatcgcggtagcaaccctcattcagccattattggcccgcataaaacaaaaaacctgatatcgcccccaggagcaatatcaggttttgcctgctgtcgcagtcacaatccgtttaaaccatcctgagcgttaaaactcagtgagtggcagctgattgttacgcgataaaatgaataactcaaacgggcagattgttaattgtgacgataatctcagcaatctcgctgccgcggggtaaaacatatctaattctgataaatccatttaccagaattagacagaatgattattactctttcggatctttgccagcgagcagtttatccagttcatcgccgccaacgtgacggaaatcctgacctttgacgaagtagaaaatatattcgcagatattctggcagcggtcgccgatacgctcgatggagcgcgcgcagaacagcgcggtcaggacgctggggatagtgcgcgagtcttccatcatgtaggtcatcagctgacgcacgatgccttcatactcctggtcgactttcttatcttcgcgatagatacgtaccgcttcgtcgagatccatacgcgcaaacgcatccagtacgtcatgcagcatctgcaccgtgtggcggcccagcgattcgaggctcaccagcagcggctggtgctgctgggaaaacttctccagcgcggtgcggcagattttatccgccacgtcgccaatgcgttccagctcagcgatagtcttgatgatcgccatcaccaggcgcaggtcgctggcggtcggctggcgcttggcgatgatgcgcacgcacgcttcatcgatagccacttccatcatgttgacctgcttgtcgccgtcgatgacgcgtttcgccagatcgctgtcctggttatgcatggcggtgatggcatcagagagctgctgttccaccagcccacccatggtcatcacctgggtgcggatatactccagttcagcgttgaactggccggaaatatgtttgttaagatttaggttgtccatggtgtctcctgattgcccaactggtgagagcctgaaagcacaagggcaaatcaaccgtagcggccagtaatataatcttcagtttgtttcttcgcgggcttagtgaacaggtcatccgtgttgctgaactcaatcagctcgccaagatacataaatgccgtatggtcggagcaacgcgcagcctgctgcatgttgtgagtcacgataacgacggtgtagtcctgtttcagctcggtgatcagctcttcgatacgcccggtggagatcgggtccagcgcggagcacggctcatcaagcagcagcacttccgggcggatcgcgataccgcgggcaatgcacagacgctgctgctgaccaccggagagagaatacccgctctggtgcagtttatctttggtttcgttccataatgcggctttggtcagcgcccactgcacgcgctcgtccatatcggcacgggacagcttttcaaacaggcgcacgccgaaggcgatattgtcgtatatggacattgggaacggcgttggtttctggaacaccatgccaaccttagcgcgcagcagggcgatatcctgggtgttagtcagaatgttgtcgccatccagcaggatctcaccttccgcgcgctgctccggatacagttcaaacatcttgttgaacgtgcgcagcagggtggatttaccacagcctgacggaccgataaacgccgtcacctggtttttggtgatatccaggttgatgttcttcagggcatggaatttgccgtagtagaagttcaggttacgaactgaaatcttacccggagctgtattcaccatactcatctcaatctcttcctcattcagcgcagcagttgctgcgctgcaaaaaattaaccgtgtttcttcttggcgaagataacgcgcgccaggatgttcagcagcaagacgcacagggtgataatcaataccccggcccatgccagttgctgccactccgcaaacggactcatggcaaatttgaaaatggtcaccggcaggttggcaatcggctgcatcatgtcggtgctccagaactggttggacagcgcggtgaacagcagcggcgccgtttccccggcgatacgggcgatagccagcaggatcccggtcataatccctgagacggaggctttcagggtgatcgccgagatcatcttccacttcggcgtccccagcgcataggccgcttcacgcaggctatccggcaccagcttcagcatgttttcggtggtacgaataacgataggcacctgcagcagcgccagcgcgataacgcccgcccagcccgagaagtgctgcatctgcgccaccacaatggtgtagacgaacagacccaccacgatagacggcgcggaaagcagaatgtcgttgataaagcggatgatttccgccagcaccgacttgcggccatactccgccagataaattccggcgaggatacccagcggcgtaccaaatacggttgcccacaggatcagcaggccgctgccggcgagggcgttagccagtccaccgcccgccgtattcggcggcggcgtcatttcggtgaacagcgccagactcatgccgtcgaaaccgcgggttatcgtcgccatcaggatccagataagccagaacaaaccaaacgccatggtcgccatcgacagcgccagagcgatacggttcttcatgcggcgtttggcctgcatcttgcgacgggactccgccagttcggcggtagtttgcaattcaatggtcgccattagcgtgccccctcattcttcgcgaggcgcataatcataaacttcgacgcggccagaacgataaaggtgataacgaacaggatcaggcccagttccatcagcgccgccacgtgcaggccggtttccgcttcggcgaactcattagccagcgcggaggtaatactgttccccggcatatacaacgagatgctgtcgagctggtaggtgttgccgatgataaaggtgaccgccatggtttcacccagcgcgcggcccagaccgagcatcaccccgccgatcaccccgtttttagtgaacggtaaaacgatgcgccagatcacctcccaggtggtgcagccgatgccataggccgactctttcatcatcaccggggtctgttcgaaaacatcgcgcatgaccgcggcgatgtaagggatgatcatgatggccagaatgacgccagcggcgagaataccgataccaaacgccgggccggcaaacagcgcaccgacgaacgggatggtcgacagaacgttgccgaccggctcctggaagtaagtcgcaaacagcggggcgaaaataaacaggccccacatgccgtacacgatgctcgggattgccgccagcagctcaatcgcaatgcccagcggacgcttgagccaggcgggggacaattctgtcagaaacagcgcgatgccgaagctcaccggaacggcgatcagcagcgcgataaaagaggtgaccagggttccgtaaatcgggaccagcgcgccgaagatctcgttaggcgcatcccactctttggtccacaaaaaggcaaagccaaacttttgaatgctcggccaggaagagatgatcagggaaacgatgatgccgcccagcatcaatagcacaatcagcgcagccagttttaccagcgcactgaaaatcatgtcaccctttttccccggaggggtaaatgcaggcttggttgcagccatagattactctttacgtattaaaacttgttcgaataaatgcccggtggcgttggctcccgggcctacagtctgaaccgtagggcgggcagcgcctgaacgcccccgccatcttcgtcaaaaatctactgttagtacagcgctttaccgctgctgtctttgacgttggttttccatgccgcgcgaacctgctctaccacgctttccggcagcgtcgcgtaatccagcgcattcgcttctttcccgccgtttttatacgcccagtcgaagaacttcagcacttcagcggtctgttccggcttgttcgtcgccttgtgcaccaggatgaaggtggttgaggtgatcggccatgcattctcgcctttctggttggtcaggtcctgagcgaaagacttgctccagtcaacgccttttgcggcgttagcgaagttgtcttcagtcgggctaaccggcttgccgtcggcagagactagtttggtgtaggccaggttgttttgcttagcgtaagcgtattcgacgtaaccaatcgagcccggcagacgctgaacaaaggcggcgataccatcgttgcctttaccgcccaaaccggttggccagtttacggtagagccggcgccgattttcgatttccactcttcattcactttggacaggtagctggtgaaaacgaaggaggtaccagaaccatcggcgcggcggaccacggcgatgttctgcgacggcagcttcaggcccgggttgagcttagcgatcgcttcgtcatcccattttttaattttacccaggtagatatcaccgagggttttgccatccagcaccagctcgccagatttcacgccaggcaggttaaccgccagtaccacgccgccaatcacggtggggaactggaacagaccttcctgagtcagtttgtcatcagccagcggagcatcagaagcaccgaaatcaacggtgttggcaataatctgcttaacgccaccagaggaaccaataccctggtagttcactttattgccggtttctttctgataggtatcagcccatttggcatacaccggcgcagggaaagttgcgcctgcgccagtcaggcttgctgctgcgaaggcagagaaagcgctcatcgataaggtcgcggcgacaactgttgcgacggtggtacgcataacgttcataatgtctcctgctgggattcgtaaatcattgtttcgaggctatggtgagcaaaataggtcaaagaggtgacagtaaaatgtacgaattatgacagttttatgacaggccgggagagtggattttacgccaaataatacgcttataactcagatggttatctctaatcatgaccgtggaatgacaaaataattttctttttatgacggcgaaatcggaccgtaaaacgatcgtttgtcatctaccgccgccagccaaaatattgcgcacgtaatcgatggaaaacagcaggtgcaaataaaaagggccgccgtcggcagccctttgcaggataggatgctttactcaaccgttaccgatttcgccaggttacgcggctggtcaacgtcagtgcctttgatcagcgcgacgtgataagccaacagctgcagcggaaccgtatagaagataggggcgatggtctcttccacatgcggcatctcaatgatgtgcatgttatcgctaccgttgaagccggcttcaccgtcggcgaagacgtatagttcaccgccgcgggcacgaacctcttcgatgttggatttcagtttttccagcagttcgttgttcggcgccaccacaatcaccggcatttccgcatcaatcagcgccagtgggccgtgcttaagctcgcccgccgcataggcttccgcgtgaatgtaggagatctctttcagcttcagcgccccttccatagcgatcggatactgatcgccacggccaaggaacagcgcatggtgcttatcagagaagcgctctgccagctgctcaatacgcttgtcctgggagagcatctgctcgatacggttcggcagagcctgaaggccgtgcacgatatcatgctcgatagacgcatcctgccctttcagtcgcgccagtttcgccaccagcatcaacagcacggttagctgagtggtaaaggctttggtcgaggccacgccgatttccgttccggctttggtcatcagcgccagatcggactcgcgcaccagcgacgagcccggcacgttgcagatggccagcgagccgagatagcccagctctttcgacagacgcagcgccgccagggtatcggcggtttcaccggactgggagagggtgatcatcaggctattgcgacgcactgcggacttgcgatagcggaattcggaggcgatttccacatcgcacgggacgccggctaacgcttcgaaccagtagcgggaaaccatcccggagttataggaagtcccgcaggcaactatctgaatatgttcaacctgagccagcatttcattggcgttcggccccagttcgctgagatccacttcgccatggctgatgcgcccggtcagggtgttcttaatcgcgttcggctgctcgaaaatctctttctgcatatagtggcggtagatacctttatcgccagcgtcatactgcagattggattcgatctcctggcgtttcacttccgcgccggatttatcgaaaatcaccaccgagcggcgagtgacttcggcaatatcgccctcttcgaggaagataaagcggcgggtaaccggcagcaatgccagctggtcggaggcgataaagttttcacccatccccaggccaattaccagcgggctaccggagcgggccgccagcagagttcccgggtcacgggtatccatgatcaccgtaccgtaagcgccgcgcaactgcgggatagcgcgcaggacggcttcacgcaaggtaccgccttgctccagctcccagtgcaccagatgggcaataacttcggtatcggtctctgtgacgaagacatagccgcgagactgcagcagggcgcgcagcggctcatggttttcgatgatcccattatggaccaccacaatgtgttcagaaacatgcggatgcgcattgctctcagacggttcgccgtgcgtcgcccaacgtgtatgggcgatcccggtaccaccgtgtaacggttgctcttctaccgcctgagccagcatctgaactttacccaggcgacgcacgcgggtcatatgaccttcgctgtcgaccactgccagaccggcagagtcatagccacggtattccagacgacgtaaaccttcgagaaggatttcagcaatatcacgctgcgcgactgcgccaacaattccacacatagttaaatttcctgataatggcgatatgccatgcgttgtcgctgacctgtatttgcccgttttccgggcgccccgagccttgtagagagtggggttattgttatggtactgcctgcggacggggatctatgttgaccctctcatcctggttcgccgggaaaatttccccggcgataatccaaattatttcttcttcaccggacgctgccagccctgtttgtggacctgcggtacgcggctcaacaccagctcattatcggcgatattgcgcgtaacggtggtgccggcggcgatagtaacgccattgcctaccgtgactggcgccaccagctgggtatccgagccgacaaagacatcatcgccaataatcgttttatgcttgttcgcaccatcgtagttgcaggtgatggtgcccgcgccgatattgacgttatcgccaatctccgcatcgcccagataggtcagatgacccgccttggagcctttcccgagacgcgcttttttcatttccacgaagttaccaacgtgggcgccttccagcagttcggcgcccgggcgcagacgggcaaatggaccgatggtgcaggccgcctgcagctgggcatcttccaccacgctgtaggggctaatttcgcagtcatcgccgatggtgctgtttttgatcacgcagccggcgccgattttcactcgatcgcccagcaccacgttgccttccagaataacgttagtatcgatctctacatcgcgcccgtgctgcagcgtaccgcgcagatcgaaacgcgccggatcgcgcagcatcacgcccgccagcagcagcttttccgcctgctccgcctggtagacgcgctccaggcgcgcaagctgcaggcggttgttgacgccttcgacttcgctcaggcgctgcggatgcactgcgacgatctggtgtccttcctggtgcgccatggcgatgatatcggtgatgtagtattcgccctgagcgttgttattggtgagtttcgccagccagcgctttagatccgctccgccggcgatcaggatcccggtgttgatttcctggatctggcgctgggcctcgctggcatctttgtgctcaacgatgcccgtcacctggccattttcacgggtaatgcggccatagccggttgggtcatccagcttcaccgttaacagaccaatcccaccctgtggtttcgcggcgcgcaggcgctgtagcgtctcaacggagatcagcggcacgtcgccatagagcatcaggatgtcttcatcatcattgaagaatggcgccgcctgctgcatagcgtgcccggttccgagctgctcagcctgcagcacccagttcaggttgtcttcatgcagagtctgacgcagcagatcgcccccgtggccgtataccaggtgtaccgcacatgcgcctaaatcgttagcggcatcaatgacatgctgcaccattggcttcccggccagggtatgcagcaccttaggaagatcggaatacatgcgggtccctttgcctgcagcaaggataaccacgctcatcgcactatttgacatactcatcctgacggtagttagaacgaaaagtaaaagcctttcacgttgaaatttctacatatttttcatcataaaacgagacgtggagaaaacgtccaggctcactgttttaccccattttatgacgctatttttaaccactgcaaatcagtttaacgctgaaaaaggagggcggggtggagaatcattaactatctcactgcttttgctgttttttcgccacctgaataaagccgcagcggcaggcgtttatcagcacccacagcgggaagaaccaggataaatattcgccagtcgctggcgggggagggcggtaaagtgattgatgctatccataaaaaacgaaaggccacctatcaggtgaccttcttttcccggtttcacatcgccagtgttgtcgttttgatgggcgatacgtcgtgtcagcgggcgagatagcgcggagcttagaagctcaggacgctaaatttagcgatgattttatggaacagtttcatgatgatttcctgacgcaggtgcagtttataacgctcttttttgtgatatacatcacataaaaagagtttacgcctcatcatttaactaatcaataacaattaagggtgaatactgttttcacttcatccgctcgtcagcagcgggcaataaaaaaagccagcctggaacccagactggctttttacgttcaagccggtgttacatcgcttttttggtcaactcgataacgcgcagtttagcgatcgctttggccagttccgcagacgcctgagcgtaatccacatcgccgtgagagctcttaatgtgctcttccgctttgcgtttcgcttccagcgctcgcgcttcgtcgaggtcctgaccgcgaattgcggtatccgccaggacggtcacgctgccaggctgcacttcaagaatgccgccggacagatagataaactcttcatgaccgtgctgtttaacgatgcgaatcataccaggcttaatggcggtgagcagcggcgcgtggcccgggtaaatacccagttcaccttcgctacccgttacctggattttttcgaccagaccagagaacatttgttgctctgcgctgacgacgtccaggtggtaagtcattgccatatcaccctccgattaaggcgttaaagttttttggctttttccacggcttcgtcgatggaaccgaccatgtagaacgcctgctctggcaggtgatcgtattcgccttccatgatgcctttaaagccacggatggtgtctttcagcgccacgtatttgcccggagaaccggtaaagacttctgccacgaagaacggctgggacaggaagcgctggatcttacgcgcgcgagctaccaccagtttgtcttcttcagacagttcgtccataccgaggatggcgataatgtctttcagttcctgataacgctgcaggatggactgaacgccacgcgcggtgtcgtagtgttcttgaccaacaaccagcggatccagctgacggctggtggaatccagcgggtcaacggccgggtagatacccagggatgcgatctgacggctcagtactacggttgcatctaagtgagcaaaggtagtggctggggatgggtcagttaagtcatccgccggtacgtataccgcctgtacggaggtgatagaaccggttttggtggaggtgatacgttcctgcagaacgcccatctcttccgccagggtcggctgataacctaccgctgaaggcatacgacccagcagcgcggatacttcagtaccggccagggtgtaacgatagatgttatcgacgaacagcagtacgtcacgaccttcgtcacggaatttctcagccatggtcaggccggtcagcgcaacgcgcagacggtttcccggcggctcgttcatctggccgtacaccagggatactttatcgataacgttggagtcggtcatttcgtggtagaagtcgttaccctcacgagtacgctcacctacgcccgcaaacacagagtaaccggagtgctcgatcgcgatgttacggatcagctccatcatgtttacagttttacctacacccgcaccgccgaacagaccaactttaccgcccttcgcgaacggacacatcaggtcgataactttgatgccggtttccagcagttcctgagagctggacagctcttcataggacggtgccgcgcggtggatagcccaacgctcttcttcgccgatgtcgcctttcatgtcaaccggttgacccagtacgttcatgatacgacccagcgttgctttacctaccgggacttcgatcgggtgctcgaggtcttttacatccagaccgcggcgcagaccatcagaagaacccatggcgatggtacgtacgataccgccgcccagctgctgctgaacttccagcaccagaacttcattaccattctgtacctcaagggcttcgtacacgcgtggtacggcatcctgagggaactcgacgtcgaccacggcgccgattacctggacaatctttccagtagccatcttaaatcctctacgaaataacctggttaaaccgcggcggcccccgagacgatctcggtgagttcctgagtaatgctggcctgacgagctttgttgtataccaactgcagctctttaatcaggctgccgccattatcggtcgcggctttcatcgccaccatacgggcggcctgctcgctggccaggttttcaaccacgccctgataaacctgagattcgacgtagcggcgcaggagggtatccagcagcgctttcggatcgggctcatacaggtaatcccaggatttacgtttcagatcagcatcttctgatgccggtaacggcagcagctgagtgatcgtcggaacctgagacatggtgttaataaatttgttgctgacaacgtacagcttgtccagacggccttcatcataggcctgcaacatcacttttaccgggccgatcagttcggacagggatgggttatcccccataccggtcacctgtgcaaccacgttgccgcccacggagttaaagaaagaaacgcccttggagccgatcattgcgaggtcgcactgaacgcctttatcggaccatgctttcatttccgccagcagtttcttgaacaggttaatgttcaagccgccgcacagaccacggtcggtcgacaccaccaggtagcccacgcgcttaacgtcgcgttcttccaggtaagggtgcttatattccagattaccgttcgcaaggtgaccaatcactttgcgcatagtatctgcgtaaggacggctggccgccatgcgctcctgcgatttacgcattttggaagcggcgaccatctccatcgctttagtgatcttttgcgtgttctggacgcttgcgatcttactacgtatctcttttgcgccggccatgagcttctcctcaatgccttgcggcctgccctaagacagaccgccagacgttaccaggactgggttgctttgaaggaatcgaggatgcctttcagcttgccttcgatttcgtcgttatagccaccggactggttaatctcttgcatcagcggagcgtgatcacggtcgacgtaagccagcagagcggcttcgaagctaccgattttcgccagttctacatcagccaggtaaccacgttctgctgcgaacagaaccagagactgctgcgcgacggacatcggcgcatactgtttctgtttcagcagctcggtcactttctgaccgtggtccagctgtttgcgggttgcatcgtcaaggtcggatgcaaactgggagaacgccgccagttcacgatactgcgccagcgcggtacggataccaccggacagtttcttcatgatcttggtctgcgctgcaccaccaacacgggatacggagatacccgggttaaccgcaggacgaataccggcgttaaacaggttggtttccaggaagatctgaccatcggtaatagagattacgttggtcggaacgaatgcggaaacgtcacccgcctgcgtttcgataatcggcagcgcggtcagagaaccggttttccctttcacttcacctttggtgaaggcttcaacgtattcggcgttaacacgcgcagcacgctccagcagacgagagtggaggtagaatacgtcgcccgggaacgcttcacgtccaggcggacgacggagcagcagggagatctggcgataagcaacagcctgtttagacagatcatcgtaaacgatcagcgcatcttcaccgcggtcgcggaagtattcgcccattgcgcaaccagcgtatggcgccaggtattgcagtgcagcagattcagatgcagtcgctaccactacgatggtgttagccagcgcgccgtgctcttccagtttacgcaccacgttagagatggtggacgctttctgaccgatagcgacatagacgcacttgatgccggaatcacgctggttgatgatggcatcgatagccagcgcagttttaccggtctgacggtcgccgatgatcagttcacgctgaccacgaccgattgggatcatggcgtcaacggatttgtaaccggtctgtaccggctgatcgacggactgacgttcgattacgcccggcgcgatcgcttcaacggcggagaaaccgtcgttttccagcggacctttaccatcaattggcgcgcccagggtgttaaccacgcggcccagcaggccacggcctaccggaacttccaggatacggccagtacatttcaccttcatgccttcggcgaggtcagcgtacggacccattaccaccgcacctacggagtcgcgctccaggttcagtgcgatagcgtaacggttacccggcagggagatcatctcgccctgcatacattcggcaaggccgtggatgcggataacaccgtcacttacagaaacaatagtaccttcgttatgagcttcgctcacaacattgaactgagcaatgcgctgcttgatcagttcgctgatttcggtggaattcagttgcatgctccagtccccttaagactgcaagacgtctgcaaggcgctcaagacggccgcgtacgctgccatcaatgaccatatcacccgcacggatgataatacctgccataacagacttatcgattttgcaattcagcttaactttgcgtgacagacgtttttccatcgcgctgacgatcctggcaagctgttcatcactcagttggttggcagatattacttctacctctgcgatggcctcactggccgcgcgcaggtgaatgaattgctcaagaacgtccgggagcaccttcagacgattattttccgccatcaccttaatcaggttctggccattttcgtcgagttgctcgccgcagatagcgataaacgcttctgagagcgtttccggcgccaaagcaccggagagaagctctgccatttggtcgtttttggtcacttcggcggcaaacgccagcatatcctgccagcgttcaacactgttgtgttcgacggcaaagtcaaaagctgctttggcgtaggggcgagctaccgttacaaattcagacatcagcccctccctccttacagttcagcgacaagtttatccacgatgtcgctgttagcagcttcatccacggaacgttcgatgatcttctcggcgccagcaacagccaggatagcgacctgcttacgcagctcctcgcgtgcacgtttacgctcagcatcaatttcagcctgcgcttgtgcaacgattttggtgcgttcctgttctgcttcagctttagcttcgtccagaatctgagagcggcgcttgttcgcctgctcaatgattacctgggcttccgctttcgcttttttcagctggtcggtcgcgttggcctgtgcaaggtccaaatctttcttagcgcgttctgcagaagctaaaccgtcagaaatctctttctggcgtttttcgatggcagccattaaaggcggccatacgtatttcatgcagaaccatacgaagataacaaacgcgatggcctggccgaggattgttgcgttcatgttcacagcacaatacctctttaattaactctgtggcttaggtttctaacaacttactacgcgacggcgaacatcacgtacagacccagacctacagcgatcatcgggatagcatccaccagacccataacgataaagaactgagtacgcagcagagggatcagatccggctgacgcgctgcgccttccaggaatttacctccgaggatgccgataccgatcgcagcaccgattgccgccagacccatcatcacagcggcagccatgtacagcagatccatattcaggttttccatgacagtctccagtttgtttcagttaaaacgtagtagtgttggtaaaaaatcaatgctcttcagatgccatcgacagatagacaatcgtcagaaccatgaagatgaaggcttgcagcgtaataatcaggatgtggaaaatggcccaaggcacattcagaacccactgtgaccaccacggcaacagaccagcaatcagaatgaaaatcagctcaccggcatacatgttgccgaacagtcgcagaccgagagagaccggtttggacagcaggcttaccccttcaaggattaagttgacaggaatgaacgcccagtgattgaacggctgcatggtcagttctttaacgaacccaccaacgcctttcattttgatgctgtagaaaataatcaggatgaacacgccaagcgccatcgacagggtgatgttcacgtcggcagacggaaccacgcgcagtgctggcaggccgaaaatgtgttcgccgatataaggaagcaggtcgattggcagcaggtccatcaggttcatcaggaagacccagacgaacacggtcagcgccagcggcgcgataaccttgctcttgccatggtacatgtctttgacgctgccatggacgaagccgatgatcatttcgatgaaggtttggaatttccctggtacgccgctggtcgctttcttagcaacgctacggaacatggcaaggaacagcagaccgagaaccaccgagaagaacatggagtcaatgttgagcgtccagaaggtggctgtgtggttgtgcggatccaccagcgagaatgtacgcaggtccaactgaaggttgttcagatggtgtcctatgtaatcctgcggcgtcatattttctgaagccatgatgcctttaccctttgttgttaattacagctggcgccagaacttgtaccaccagcaccaaaacccacgtcacgatcagtggcaaaaataccacttttaaaacggccagcgccaccgccagaagggcgaaggtcagcaacaccttgaaggcttcaccgaaggcgaaggtccaggccacacggccttttgctggtgtatgcgcctgatgacgccaggcaaaaattataaacatcagatttggcaagaccactgccaaaccgccgcatacagcggaaatgccccagaaggggtctttgaggctgaacagcagtccacttgccattactgccagtaactgaataaacagaagcttgcgagcaacgtttcgactcaagagcgacactgacatcacgtttttactcctgctccctttgaggtatgtcgcgtgtcgtataaaacgtcctttaagacgaagagtcaagcatcaaaaagcggacaaattatacggtgacgccccgtgatttcaaacaataagtagcaaaatagtgaataaatgtttaattattttccaacggacaactttccgtgcatttcagcgttctgtgagcggtcatacaaaactgcaaataacgagggaacacggcaattaaagcgtgcatcagatcacataataaacatttcaagcgccctttaatgaatcaaggacataaaacactatttttcatgcttttgatattcaagataaaaagtgaggacattatctaaaacaacctcacatacaataaaaaccttttattgacatttataataaaaatttaacatcactatgctgttcatcattgtcgatttttagcaccctgatattttcaaagttgactattttgtcagtgaatcacttacgctaagttaactgcaagaaaagccttagtaaaaacaaggttaaatgcagcccgttaatatcgggggacgtcctttatttttgtaacatgcgcgggccacattttttccacattttttgataaaaattaactcgattttggcttaatcaccaccaggtgccgctccccttccaaccgaggaacatgcagctcaatcacctcgacaatgtcatacccttccggcagactttccatttcttctttttgcgctaaccctttgagcgcatagaagtgaccattcgctgccggcagatgatggcaccagctcaccatatcattaagcgatgcgaaagcgcggcttatcacgccatcaaacggcggctcggccgggaaggcttccacgcggctctgcaccggggtgacgttatccagcttcagctcgtgctgcacctgacgcaggaagcgcacgcgcttgccaaggctgtccagcagggtgaaatgtgactccggacatacgatggccaacgggatcccaggcaaccccgggcccgtaccaacatcgataaagcgcgagccctgcagataaggcgccacgatgatgctgtcgagaatatgacgcaccagcatctcattcggatcgcgaacggaggtcaggttataggctttgttccacttatcgagcagtccgacgtaagccaccagctgatttttctggtgatcggtgagcgaaatacccgcttcatccagcagacgagaaagtttgttgagcacggtaagtaccttcaaaaaataatgagcccggaggcgctaacgcttaccgggctatgaatgataaaggcgaacgctgattatgcaactgggaaatcagcgcggcaggcagccgcaatcaggcgctgcggcgcagcatcccctgctttttcagccaaaccagcaaaatagagatcgccgccggggtgatcccggagatacgtgacgcctgccctatcgacgacggtttatggtcgttcagtttggcaatcacctcgttagacagcccagtgacctggcggtagtcgagggtcgctggcagcaaggtattctcattgcgctgttgtttctcaatctcatcctgctgacgcgcgatatagccctcatacttcacctggatctctacctgctcagccgcctgacgatcttccagtcccggggtgaatggcgagagttgaaccagctgttcgtaggtcatttccggacgacgcagcagatcttcgccgctagcttcacgcgacaacggcgcggtcaggtgagcgttcacttcgttggcgctctctgcctgcggattcacccaggtggatttcagacgctggcgttcacgttcgatgctttccagcttctcgttgtagcgcgcccagcgttcgtcatccaccagacccagctcgcgcccctgttcggtcagacgcaaatcggcgttgtcttcgcgcagcatcagacgatattcagcgcgggaagtaaacatgcggtacggttctttggtacccagggtgcagaggtcatctaccagcacgccgaggtaagcctgatcgcgacgcggcgcccagccctctttttccgcagagaagcgggcggcgttaagtccggccagcagcccctgagccgccgcctcttcataaccggtggtaccgttgatttggccggcgaagaacagaccctgaataaatttgctctcaagcgttggcttcagatcgcgcgggtcgaagaaatcgtactcaatagcgtagcctggacggacgatccgcgcattctccatcccctgcatcgagcggacgatttgcatttgcacatcaaagggcaggctggtggatataccgttcggataaatttcgtttgaggtcagtccttccggctcgaggaagatctgatgctggttgcgatcggcaaagcgcatgactttgtcttcgatcgacgggcaatagcgaggtccgatcccttcaatcactccggcgtacataggactgcgatcgaggttattgcggatcacatcgtgggttttctcgttagtgtgggtgatatagcacggtacctggcgcggatgctgatccgcggatcccatgaacgagaagaccggcatcgggttatcgccatgctgctgcgccagcacgctgaaatcgatggtgcgcgcgtcaatacgcggcggagtaccggttttcagacgacttacgcgcagaggcaattcacgcagacgacgagacagcgggatagacggcggatcgccggcgcggccgccgctgtagttgtccagaccaatatggattttgccgtcaaggaaggtcccgacggtcagcactaccgctttagcgcggaatttgaggcccatctgggtgacggcgcccacgacgcgatcgttttcgacaatcagatcttcaaccgcctgctggaagatcatcaggttcggctggttctccagtgcggtacgtactgcctgacgataaagcacgcggtcagcctgagcgcgggtggcgcgcactgccggtcctttgctggcgtttagtatcctaaactgaatgcccgcctgatcgatcgctttggccatcaaaccgccgagcgcatccacttcttttaccaggtgtcctttcccaatgccgccaatcgccgggttgcaactcatttgccccagcgtgtcgatattgtgtgtcaaaagcagggtttgttgacccatacgcgctgcggccattgcggcctcagtgcctgcatgacccccgccaatgataatgacgtcaaaaggatcctgataaaacatggtggtctgcctcgcataaagcggtatgaaaatggattgaagcccgggccgtggattctactcaactttcgtctttcgagaaagactccgggatcctgagtattaaaaagaagatctttatatagagatctgttctattgtgatctcttattaggatcgactctctttgtggataagtcggatccgcgaagtaagatcaaaagcttaagaaggatcactatctgtgaatgatcggtgatcctggtccgtataagctgggatcagaatgaagggttatgcacagctcaaaaaccatactacggttattctttggataactaccggttgatccaagcttttaagcatggttatccacagaagatcggacgatctttacaattctcagagcaaatttttccaggatcccagccagatttccgctggatcctccggaatttcgtgttcaaggacgttgatcttcagcgtctcaccgatctgttttgccccgcaggccttcagcgccgcttctaatttatcgatcgcgccgcaaaaggtgtcgtattcgcggctgccgatccctatagcgccaaagcgcacggcggaaagatcggcctgcttctcctgcagcgcgtcatagaagggaaccaggttgtcgggaatgtcgccggcgccatgggtggaagagataattaaccagatcccttgcgcctgcagatcgtccaccagcggaccgtgctggatttcagtgctatagccggcttcttccagcttttccgccagatgctctgctacatattccgcactgcccagggtgctgccgctgataagtgtaatgtctgccatagatcgccgatcgcccgctcaactgttcagagtggcgtattgtacgctgtgagcgagctgggatctacctgtggaaaaatgtgggattaaaaaaagcgatcagggcttgatggtgcgcatgatcgggttctgcagcacgatcagagtttcagtggactgaatttcatcgattgtttggatcttgttgataagtacctgctgcagagcatcgatggatttacacatcaccttaataaagatgctgtagtggccggtggtgtagtaagcctcggtgacctcctccagactttccaggcgggcgagggcggagggatagtctttggcgctttttaaaataatgccgatgaagcaaccgacgtcgtagcccagctgcttggggctgacgtcaatgcgcgcgccggtaatgatacccgcctgcttcatcttttcgacgcgcacgtgaatggtgcccgggctgacgctgaactgtttggccagttcggcataggcggtacgggcgttggccatcagcgcatcaagaatgccgcggtccagattgtcgatctgataattttccatatctttttcttatgaagtttgagggttcttactattttagcgccatattttaatgaattaaaagttgatgcgcctttttattgattgattattgtattgccgccctgttttgttgcttaatcaatggcaacaggacgcaggagtcataaaaatgaaaaccgcatatatcgcaaaacaacgccagatcagtttcgttaaatcccacttttcccgtcagctggaagagaagcttggcctgattgaagtccaggcgccaatcttaagccgcgtgggcgatgggacgcaggataacttgtccggctgcgagaaagcggttcaggtaaaagtgaaaacactgcccgacgcccagttcgaagtggttcattcgctggcgaagtggaagcgtcaaaccctgggacaacacgacttcagcgcgggcgaagggctgtacacgcacatgaaagcccttcgccccgatgaagaccgtctgacgcctatccattccgtctatgttgaccagtgggactgggagcgcgtgatgggggatgaagagcgtcacgtcggcaccctgaaggcaaccgtcgaggcgatctacgccgggatcaaagccaccgagctggcggtcagccaggagtttggcctgacgccgttcctgccggaacagatccattttgttcacagccaggagctgctgagccgctatccggagcttgatgccaaaggtcgtgagcgggctattgccaaagagctgggcgccgtcttcttaattggtatcggcggcaaactagctgatggcaagcgccacgacgtgcgtgcgccggattatgatgactggagtactgaggtttctgaaggttttgccggcctgaacggcgatatcctggtgtggaacccggtgctggaggatgcgttcgagatctcctcgatggggatccgcgttgacgccgaggcgctaaagcgccagctggcgctgaccggcgatgaagatcgcctgaaactggagtggcaccaggcgctgctgcgcggcgagatgccgcagactatcggcggcggcattggccagtctcgtttgacgatgctgttgctgcagcttgaccatatcggtcaggtgcagtgcggcgtatggccggcgcaggttcgcgaaagcgtttccgcgctgctgtaacgattagcgccgccagcgtcgcagcaggcggctacgcagcccggtgtcaaagcgccagatatgatcgaagatgcgcatgatgccgggtttgccgtgaaccgacatcgccaccgcgtgaaaacggtgctgatgcttacgctgtaactcccccacctgagcaatcacctcatccggcaaccgttgggcaataaagtcggagatcaccacggcatccgcatccacccactgcgggttttgcaaacgttcaataatggcgcgaaaacagctggccagatcggtgccgccgcgaaaacgctggctcaggaaacggatcgcctgctccagtccgctctcgctggtcaactcgtaatgcactacttcgctggaaaacagcataatgaagcagcgacggttatcggccagcgcgatgcgcatcagggccagacaaaaggccttagcgcactgttcgttaaaaccgcccatcgatcctgacgtatcgacgcagacaatgaacggcccgcgcggttgctcatcaaaatcctgccgcgttaccgggcgttcggtaattttctcgcgccaggcatcgccgtgtagccggtaggtgagcagctgtttctccaccagcttgcgataaaattcaaactccagctccgtgatgccaagcgtcgccagctccggcggcagcaggcgtagaatgtcgtcgctctgctggaggccgtcgacctgttcaggcaccgttgccggctcgcgtaccaggctgcggaaggtttccatcggcgcatctttcttcggcacggatttcgcttcccttgaacgccccagctgttccgccagctgcagcagctccggttgctggttaagaaaatcgccatagcgcacgatcagctggtagtcgcctcgtttgagttcgccggcgctcatatcccacaggcgtccggcggcggtatcattttccgccagcaccggatcgagctgaccgctgagcgtcattcgttcctggacctcactgagcaactggtcgcgctcctcgtccagcagctgctggttaaggctggtggcttgcaccaccaggctcaggcgccagcgctgtaaaaacagcgtatgcagcgccggggtaaaggtggcattgtcatccaccagcttctgcgcctgggcggcaaaaggggactggagctggtgcagtttgccgagaatttgcgggagctggacgataaactgcgaggtagagagcagctgagcctgctgataggtttgcacttcggcgtccagatccggcgggatgttaacttcttttaagcgggcgcgaacggcttcccgccagcgcggaatatccgccgcgatgatgtttttcaggcggggaaatttttcaaagaacaccgccagttgaggagaggccaacagcgccagcagcatctcctcgatcattccctcttcgctgactgccagcatgacattcagcatatcgagcgtcatggctgcttcgcctgtttaatctgcgcgccgacgtcctgcaggctggcttcgattcttcccagccattcgaccgggataaacaggcacttttgctgctcgctgaagcggttgtgttgctggtgccactcatcatccagcgcttccagctgctggcgaatttccgccggcatattctcctgcgctgcgctgccgggcagcgcgaggcgtgagccctgcaggctcacatcgcggacgaccagatgctggctggtgtcgacatccatattgagtagttgagcaaagccgatcccgttgagcttaccgcggatctcgccgcccttttccagccagttggctaacgcctcgcgttcaaaagtaatgtggatcacttccatatcgtgaagtttgagcggctgctgcagcagcagcgtcagggtggtcccctggatctccgccggcagttcatagtgcggtttgcggctaaacatcccgccaaggcgggtgaccttcagcgccgttttgtcgctttgctgttgttggatctgaatgcgtcgctgcacaatcgcccccaaccgcgtcagcatcgcctgctgttgccaggcgtgacaggtcatgagcgtttccagctgctgcgacatcaggttcatactttcgacgttgtgccacagacaatctttcagcaggattaggtcaatcggcgcgatgctgtcgcggccgctgaagaaggcgctggcctgcagcaggcgaatagcctttttccagcggcgatccgagacgtagggggcatttggcagggcgtccagctgctggcggagctggaatatcagctcaaacaccgcgtccggcagtttaatattgccgatctgctgctgccattgggtaaattcctcgtcgctcacctgcagcgcgctgggcactggattgctgttttcatcctgctggctgaccagcatcgaacggaaattacctttatcctgcactttatcaagccatagacggatcagcattcggtcatacagcgcttccaggctgctgtcggcttccgggagttcgttcgacgcggccaccagcaggcgcattgggattttctcttcatgcgcgccattgcggaagtgacgttcgttaatcgccgtcagtagggtgttgaggatagccggacctgctttccatatttcatcgagaaacacgatttccgcttccggcaggtagccggcggttaaacgttcgtaacggccttcatctttcagcgcctgaatggacagtggcccaaaaacctcttccggggtagagaagcgggtcatcagatattcaaaagcgcgcgcctgctggaaggcgaatttgaggcggcgggcaatcaggcttttggcgatccccggtggaccaagcaaaaaaacgctctcgccgctgagcgccgccagcaggcagaggcgtatcgcgtggctgcgttcaaagagtcctttttcgagtgccgcgctgagccgggaaattctttcagccagtaaatgtgtttgagccataattgagttgcgtgctttgtcatgtatcgttattgggacgagtatagatgttagagccggggcggtaatagcctgaagaatcgatttattttttttgagccaggttaatatggtgtctgttaggggtacgatttcacaaataatcgtgcatactgtgcgctttttgtgggccaagggactaggcacacatttgttttataaacgaaaagactagtctatgagcactgataataaacaatcgttgccggcgttaacgctggcggccatcggcgtggtgtacggcgatatcggtaccagtccactgtataccctgcgcgaatgcctgtcaggtcagtttggctttggcgtagagcgcgatgccgtttttggctttttgtcgctgattttctggctgttaatctttaccgtatcgattaaatacatcaccttcgtgatgcgggcggataacgccggggaaggcgggatcttaacgctgatgtcgctggccggacgtaatacttcggccagaatgacctccgtgctggtgatcctcggccttatcggcggcagtttcttctatggcgaagtggtgattaccccggcgatttcggtaatgtcggcgatagaggggttagaaattatcgccccgcagctcgatacctggattgtccctatctccattatcgtgctcaccctgctgtttgtgatccagaagcacgggactggcatggtcggcaagctgtttgcgccgattatgctgatctggttcctgttgctggcggtgctgggcgcgcgaagcatttacgctaatccggaagttctgcaggcgctgaacccctactgggctgtgcacttcttcctgcaatacaagaccgtttcctttattgcgcttggcgcggtggtgctgtcgattaccggggtggaagcgctgtacgccgatatgggccacttcggcaaactgccgatccgcgtcgcctggttctccgtcgtgctgccctcgttggtgctgaactattttggccagggcgcgctgctgctgaagcacccggaagcgattaaaaacccgttcttcctgctggcgcctgagtgggcgctgatcccgatgctgattatcgccacgctggcgacggttatcgcctcccaggcagtgatttccggggtcttctccctgacccgtcaggcagtgcgtctgggctatctgtcgccgatgcgcattatccatacctcggaaatggagtccgggcagatttacattccgttcattaactggctgctgtacgtttctgtggtcatcgttatcgtcagctttgagcattcgtctaacctggcggcggcgtatggtatcgccgtaacgggcaccatggtgctgacctccattctgtcggcgaccgtggcgcgcaaaaactggcactggaacaagctgtttgtcggtctgatgctggtggccttcctgtgcattgatattccgctgttctcggcgaacctcgataagattgtctccggcggctggctaccgttgtccctggggatggtgatgtttacggtgatgacgacctggaagagcgagcgtttccgcctgctgcgccggatgcacgagcatggcaactcgctggaagcgatgatctcttcgctggagaagtcaccgccagtgcgtgtgccgggtactgcggtgtatatgtcccgcgccctgaacgtgatcccgtttgccctgctgcataacctgaagcacaacaaggtgctgcatgagcgagtgatcctcctgaccctgcgtaccgaagatgcgccttacgtgcataacgttcgccgggtgcagattgagcagctgtcaccgtccttctggcgggtggtggccagctacggctggcgggaaacgcctaacgttgaagaggtgttccaccgctgtggcctggaaggactcagctgccggatgatggagacctcgttctttatgtcgcatgagtcgctgattatcggcaaacggccatggtatcttcgcctgcgcggcaagctttatctgctgctgcagcgtaacgccctgcgggcgccggatcagtttgagatcccgccaaaccgggttatcgagctcggtacccaggtcgaaatctgatgtcaaaaaagcccttccattgcgaagggctttttgtttctcactccggttgttatgtcctgtcgctgcctcgcgaaacgtttcgatggcgatcacatttctctcttctggtgatggttttctgctcacacattgataataattattttagcgaaacgtttcgctagtggagcaaaagagaaaaaatgaaaaaaggcaccgtacttaacgctgatatttccgcggtcatttcccgcctgggccacaccgatacgctggtggtctgcgatgccggattaccggttccccgcagcagcacgcgcattgatatggcgctgactcagggcgtaccttcatttatgcaggtgctggaagtggtgacgacggaaatgcaggttgaagcggctgtcatcgcggaagagattaaaacccataatccgcaactccacgcgacgttgctcactcacctcgagcagctgcagcagcaccagggaaataccattgaaattcgttacaccagccatgagctgttcaaaaaacaaaccgcagacagtcaggcggtaattcgcagcggggagtgttccccgtttgcgaatatcattctctgtgccggcgtcacgttctgaggtcgccgtcatggaagccttattgcaactgaaagggatcgacaaagcgttccctggcgtcaaggcgctctccggcgcggcgctgaatgtctatgccggccgggtgatggcgctggtaggggaaaatggcgccggcaagtccactatgatgaaggtgttgaccgggatctacacccgtgatgccggctctttgctgtggttaggcaaagagacgacctttaacggcccaaaatcctcccaggaagccgggatcggcattatccatcaggaactgaacctgatccctcagttgacgatcgccgagaacatcttccttggccgcgagttcgttaaccgttttggcaaaatcgactggaagcagatgtatgccgaagccgacaagctgttggcaaagctgaatctccgctttaccagccagaaactggtgggcgatctatcgattggcgatcagcaaatggtggagatcgccaaagtgctgagcttcgaatcgaaagtcatcattatggatgaaccgaccgatgcgctgaccgataccgaaaccgaatcgctgttccgcgtcatccgcgaactgaagtcgcaggggcgcggtatcgtctatatctcccaccgtatgaaagagatcttcgagatttgcgacgacgtgacggtctttcgtgacgggcagtttatcgccgagcgcgaggtctcgtcgctggatgaggaccgacttatcgagatgatggtcggccgtaagctggaagaccaatatccacacctcgataaggcgcccggcgcggtgcgcctgaaggtcgacaacctctgcggcccgggggtggataacgtgacctttaccctgcgccagggggagatcctcggcgttgccgggctgatgggcgccgggcggaccgaactgatgaaagtgctgtacggcgcgctgccgcgcagcagcggttccgtgacgctcgatggccgcgaagtggtgacccgttcgccgcaggatggtctggcgaacggcattgtctatatctccgaagaccgtaagcgcgatggtctggttctcgggatgtcggtaaaagaaaacatgtccctgacggcgttgcgctatttcagccgggcgggcggtagtcttaagcataaagatgaacagcaggcggtgagtgatttcatccgcctgtttaacgtgaagacgccttcaatggagcaggcgatcggcctgctctccggcggcaaccagcaaaaggtcgccatcgcccgcgggctgatgacccggccgaaggtgctgatcctcgatgaaccgacccgcggcgtcgacgtcggggcgaagaaagagatctaccagctcatcaaccagttcaaagccgacggcctgagcatcattctggtctcctccgagatgccggaagtgttgggcatgagcgatcgcatcatagtgatgcatgaagggcatctcggcggtgaattcacacgcgagcaggccacccaggaagtattgatggctgccgctgtgggcaagcttaaccgtgtgaatcaggagtaagaaagatgacaacccaggctgtttctggtcgccgctatttcacaaaagcgtggctgatggagcaaaaatcgctgattgccctgctggtgctgatcgcggtggtatcgaccatgagccccaacttttttaccgtcaataacctgttcaatattctgcagcaaacctccgttaacgccattatggcggtagggatgacgctggtcatactgacctcggggatcgatctgtccgtcggctccctgctggcgctcaccggtgcggtggcagcgtcgatcgttggcattgaggttaatgcgctggtggcggtcgcggctgccctcgcattaggtgcggcgatcggcgcagtcaccggggtgattgtagcgagaggccgcgtgcaggccttcatcgccaccctggtgatgatgctgctgctgcgcggcgtaaccatggtgtacaccaacggcagcccgatcaataccggctttagcgataatgccgatctgttcggctggtttggcatcgggcgtccgctggggatcccgacgccggtatggatcatggcgattgtcttcctggcggcctggtacatgctgcaccatactcgcctgggccgttatatttatgccctgggcggtaatgaagcggcgacgcgtctgtccgggattagcgtcaataaagttaaaattatcgtttacgccttgtgcggaatgctggcttcgctggccgggatcatcgaagtggcgcgtctctcctccgcgcagccgacagcggggacgggctatgagctggacgccattgcggcggtggtgctcggcggcaccagcctcgctggtggcaaaggacgcattgtcggcacgctgattggtgcgctgatccttggcttcctgaataatggtcttaatcttttaggcgtttcttcctattaccagatgatcgttaaagcggtggtgattttgctggcggtactggtagataacaaaaagcagtaactgagaactctacaggacatcttaactatgaatatgaaaaaactggcgaccctggtctctgctgttgcgctaagtgcgaccgttagcgcgaacgcgatggccaaagacaccatcgctctggttatctctaccctcaacaacccgttcttcgtgtcgctgaaagacggcgcgcaaaaagaagctgacaagctgggctacaacctggtggtgctggattcccagaacaacccggcgaaagagctggcgaacgtccaggatttaacggtgcgcggcaccaagctgctgctgatcaaccccaccgactctgatgccgttggcaacgccgtgaagatggcgaaccaggcgaaaatcccggtcatcactctcgaccgtcaggcgacaaaaggcgatgttgtgagccatatcgcctctgacaacgtgcagggtgggaaaatggctggcgattacatcgcgaaaaaagtgggtgaaagtgcaaaagtcattgagctgcagggcattgccggaacttctgcggcgcgcgagcgtggcgaaggctttaaacaggccgtggcggcgcacaaattcaacgtcctggccagccagccggccgatttcgaccgcaccaaaggcctgaacgtgatgcagaacctgctgaccgcacatcctgacgtccaggcagtgttcgcgcaaaatgatgaaatggcgctgggcgccctgcgcgcgctgcagaccgcaggcaagtccgatgtgatggtggttggatttgacggcactccggatggcgaaaaagcagtaaacagtggcaaactggcggcgaccgtcgcacagttgccggagcagatcggcgcgaaaggcgttgagactgctgataaggtactgaagggcgaaaaagtggaagctaactacccggttgagctgaagctggtcgttaagcagtaatatgcgattcggactggcaacggtccgagggacaatataaaaaaagaaaagcagggcatgcgccaccggatcccggtggcgcgctttcccgggaacagaaatgatgaaaactgcaggcaaacttgtcgtccttggcagtatcaatgccgatcacattcttaaccttgacgctttcccgacgccgggcgaaaccgtcaccggccaccattatcaggtggcgttcggtggaaaaggggccaaccaggcggtggccgccgggcgcagcggagcggatatcgcgtttatcgcctgcaccggcgatgacgatatcggtgaacgcatccgtcgtcagctggcgagcgataaaatcgacgtggcgcccgtgcgcgcggttgccagggaagcgaccggggtggcgttaattttcgttaacgccgaaggtgagaatgtcatcggtattcatgccggcgccaatgcggcgctttccgtctcccaggttgaggcggaaaaagagcgtatcgccagcgcacaggcgttgttgatgcagctggagtcgccgctggagagcgtcatagcggcggcgaaaatcgcccatcaccatcacaccaccgtggtgctgaaccccgcgccagcgcgtgaactaccggatgaactgctggcgctggtggatattattacccctaacgaaaccgaagcggaaaagctgaccggtattcgcgttgagagtgacgaagatgcggcaaaagccgccaacgtgctgcatgccaaaggcattggtacggtgatgatcaccctcggcagccgcggcgtctggctcagtgccgaaggcgaaagccgccggatcccagggtttcgcgtacaggccattgatactatcgcggccggtgatacctttaacggcgcgctggtgaccgcgctgctggaagggaccgccctgccggaggcgattcgctttgcgcatgccgcagcggcgatcgccgtaacccgcaaaggcgctcagccgtccgtgccttggcgcacagagatcgatgaatttttagcgcaacaggggtaatgcttggctacgatgaaagatgtggcccgcatcgcgggcgtttccacatcgacggtgtcacacgtcatcaataaggaccgctttgtcagcgaggcgattaccgccaaagttgacgctgcgatcaaaagcctcaactacgccccctctgcgctggcgcgtagcctcaagctcaatcaaacccgtaccatcggcatgctgatcaccgccagtaccaatccgttttattcggagctggtgcggggcgtggagcgtagctgctttgagcggggttatagcctcgtgctctgcaataccgaaggtgatgagcagcgaatgaatcgtaatctggagacgctaatgcaaaaacgcgtcgatggattactcctgctgtgcacggagactcatcagccctccccggaaatcatgcagcgctatccgtcggtaccgacggttatgatggactgggccccctttgatggcgatagcgatctgattcaggataactcgctgctcggcggcgatatggcgacccagtatctgattgaccaggggcatttacgcattgcctgtattgccggcccgctggataaaaccccggcgcgcctgcgtcttgaaggctatcatgccgcgatggcgcgctgcggcctgccggttgccgaaggatatgtggtgaccagtgattttgagtttggcggcgggtttagcgcgatgcagcagctgctggcgttgccgcagcgtccgcaggcggtgtttgtcggtaacgatgcgatggcggttggcgcttatcaggcgttataccaggccgggctgcagattccgcaggatatggcgctggtgggctacgatgatattgagctggcacgttatatgacgccgccattgaccaccattcaccagccaaaggatgagctgggggaactggccatcgacgtactgatccatcgcatggccgatccgcagcaaatacagcagcgcgttcagttaacgccggagctggtggttcgcggttccgcttagcgtttatgccgctcgctaatcaggttgcggccatccttcgctcttaacagcataaacatcagcgccgatataatggttatcacgcccatggttataaaggtgtagtgaaactgctgtaccgtgcttgcattatcaaaaccttcatagaagcgtagcaccgcagcgctgatggccaccccgagactaattgaaagctgctgggtgacggccagcaggctgttgccgctgctggcattatcatcggtcagatcggccagggtaatggtattcatggcggtaaactgcgtggacatcgccatccccagcacgaacagcggcagaagaagcatccacagcggcatctctggcgactgcagcgagaactgggcgatcataaggccaataaacacggtgatccccaccagggtcttacgatagccaaaccagcgcagcacctgggtaacggtggatttcgcaataatcgagccgatagcggtgggggcgatcatacagccggcgataatggccggatagccgaaaccaacctgtagcatcagcggcatcagaaacggtacgcagccggtacccaaccgcgtggcgaggttgccggcaatgccgaccgagaacgtatgggtcttaaataaagagagcgagataagcggcgtcggatggcgacgcgcgtgacgcacataggccacgagcagtaacagactgacggcaatcacggccagcgcctgccatgtcgccacgattttttccccaaacagttcaataccgctggaaaataacaccagacttaagccaaataacagaaaaccgcctatatcgaagcgtcggcgcggcgttgtgaaatttggcatgtatttacgggcgtacagaatgccaattacgccgatcggaatgtttatcaggaaaatccaatgccagctggcccaggtcacaaataccccgccgagtaccgggcccagaatcggccccaccaatcccggcatggtgacaaagttcaggaccggcaacagttcgctgcgggggtaggcacgcagcagggccagcctcgccaccggcatcatcatcgccccaccgatcccctgaattacgcgaaaaatgaccagttccgttaaggaactggagagggcgcaggcgagggaaccgagggtgaacaggctaacggcgatgataaagacccggcgcgtgccgaagcgatcggccagccagccgctgaccgggatcagcatcgccaccgtcagcgtatagctgataatggccgactgcatcgctaagggagaacgattaagactgtgggcgatagccgggagggcggtgttaagaatggtggcatccagcgcctgcataaagaaggccatcgccgcgatccacggcaggccagccatgctgcgccctttttttccgctcatgccaaatccttgttattgatttacgtggtgtggggcgttcaacaatgcctggcaggcgagcaacgcccccggcgcatcactgttaagaatggcatcgacaatcgcctggtggagatcgagcttcaccacttcattttgcgtaatcgacgtgaagtaggtgtggtagaccgaatgaaacagcgaggcgaaagagctgaggaaaggattaccgctcatttcatagatatgctcatgccaggccatatcgacttctatccagcgttcgcgctgaaaatggcgtttcagagcaatcatctcttccattaatgtattgagctgcgctttttgcccggcggtgccgttggcggcggcgagaaagcaggcctgtggctccaggctgctgcgcatgacgagaaagtggcttaccacctcttcgaagttatcttctgttagccaccaggagagcagttccttatcaaggaaattccagctgctgcgcggcatcacccgggtgccaatgcgagggcggggcagcagcatgccttttgcagtaagcgtcttcaccgcttcgcggacggcggtacggcttacgccgaactgctcccccaactccatttcgccgggaagaatgctttccggctgatattcgccagtcagtattttttgggcgagcttttcggccagtacccaggagatgttcttttgtgccgccagttgctgtgcgcttaaagacataaatgccgttcctttctttcctctactctaacagtatgccaccaggcgccccgtttcgtcggttaaaacggcaaaacggcggttttttgcgacattcctcgccgcattgttgaaaaaagagacggttgaaaactttttttgcatttccccttgtcacctcagaattactccctataatgcgcctccactgacacggaacaacggcaaacaagccgccgggtcagcggggttccggtgaggacctcgcagagaaaagcaaaaataaatgcttgactctgcagcgggaaagcgtaatatgcacaccccgcgccgcagcgaaaacgaagcggcactgctctttaacaatttatcagacaatctgtgtgggcactcaaagtgacatggattcttaacgtcctcggacgaaaaatgaataccaagtctcaagagtgaacacgtaattcattacgaagtttaattctttgagcatcaaacttaaattgaagagtttgatcatggctcagattgaacgctggcggcaggcctaacacatgcaagtcgagcggtagcacagagagcttgctctcgggtgacgagcggcggacgggtgagtaatgtctgggaaactgcctgatggagggggataactactggaaacggtagctaataccgcataacgtcgcaagaccaaagtgggggaccttcgggcctcatgccatcagatgtgcccagatgggattagctagtaggtggggtaacggctcacctaggcgacgatccctagctggtctgagaggatgaccagccacactggaactgagacacggtccagactcctacgggaggcagcagtggggaatattgcacaatgggcgcaagcctgatgcagccatgccgcgtgtgtgaagaaggccttcgggttgtaaagcactttcagcggggaggaaggcggtgaggttaataacctcatcgattgacgttacccgcagaagaagcaccggctaactccgtgccagcagccgcggtaatacggagggtgcaagcgttaatcggaattactgggcgtaaagcgcacgcaggcggtctgtcaagtcggatgtgaaatccccgggctcaacctgggaactgcattcgaaactggcaggctagagtcttgtagaggggggtagaattccaggtgtagcggtgaaatgcgtagagatctggaggaataccggtggcgaaggcggccccctggacaaagactgacgctcaggtgcgaaagcgtggggagcaaacaggattagataccctggtagtccacgccgtaaacgatgtcgatttggaggttgtgcccttgaggcgtggcttccggagctaacgcgttaaatcgaccgcctggggagtacggccgcaaggttaaaactcaaatgaattgacgggggcccgcacaagcggtggagcatgtggtttaattcgatgcaacgcgaagaaccttacctggtcttgacatccacagaactttccagagatggattggtgccttcgggaactgtgagacaggtgctgcatggctgtcgtcagctcgtgttgtgaaatgttgggttaagtcccgcaacgagcgcaacccttatcctttgttgccagcggttaggccgggaactcaaaggagactgccagtgataaactggaggaaggtggggatgacgtcaagtcatcatggcccttacgaccagggctacacacgtgctacaatggcatatacaaagagaagcgacctcgcgagagcaagcggacctcataaagtatgtcgtagtccggattggagtctgcaactcgactccatgaagtcggaatcgctagtaatcgtagatcagaatgctacggtgaatacgttcccgggccttgtacacaccgcccgtcacaccatgggagtgggttgcaaaagaagtaggtagcttaaccttcgggagggcgcttaccactttgtgattcatgactggggtgaagtcgtaacaaggtaaccgtaggggaacctgcggttggatcacctccttaccttaaagaacctgcctttgtagtgctcacacagattgtctgatgaacgtaaagaagcaaggcgtcttgcgattgagacttcagtgtccccttcgtctagaggcccaggacaccgccctttcacggcggtaacaggggttcgaatcccctaggggacgccacttgctggttcgtgagtgaaagacgcgtgccgatgtatctcaaaactcatcttcgggtgatgtttgagatatttgctctttaaaaatctggatcaagctgaaaattgaaacgacacacagttaatgtgtgttcgagtctctcaaattttcgcaatcagaagtgaaacatcttcgggttgtgaggttaagcgactaagcgtacacggtggatgccctggcagtcagaggcgatgaaggacgtgctaatctgcgaaaagcgtcggtaaggtgatatgaaccgttatagccggcgatgtccgaatggggaaacccagtgcaattcgttgcactatcgttaactgaatacataggttaacgaggcgaaccgggggaactgaaacatctaagtaccccgaggaaaagaaatcaaccgagattcccccagtagcggcgagcgaacggggagcagcccagagtctgaatcagcttgtgtgttagtggaacggtctggaaagtccgacggtacagggtgatagtcccgtacaccaaaatgcacaggttgtgaactcgaagagtagggcgggacacgtggtatcctgtctgaatatggggggaccatcctccaaggctaaatactcctgactgaccgatagtgaaccagtaccgtgagggaaaggcgaaaagaaccccggcgaggggagtgaaaaagaacctgaaaccgtgtacgtacaagcagtgggagcaccttcgggtgtgactgcgtaccttttgtataatgggtcagcgacttatattctgtagcaaggttaaccgtataggggagccgcagggaaaccgagtcttaactgggcgttaagttgcagggtatagacccgaaacccggtgatctagccatgggcaggttgaaggttgggtaacactaactggaggaccgaaccgactaatgttgaaaaattagcggatgacttgtggctgggggtgaaaggccaatcaaaccgggagatagctggttctccccgaaagctatttaggtagcgcctcgtgaactcatcttcgggggtagagcactgtttcggctagggggtcatcccgacttaccaacccgatgcaaactacgaataccgaagaatgttatcacgggagacacacggcgggtgctaacgtccgtcgtgaagagggaaacaacccagaccgccagctaaggtcccaaagtcatggttaagtgggaaacgatgtgggaaggcacagacagccaggatgttggcttagaagcagccatcatttaaagaaagcgtaatagctcactggtcgagtcggcctgcgcggaagatgtaacggggctaaaccatgcaccgaagctgcggcagcgacactatgtgttgttgggtaggggagcgttctgtaagcctgcgaaggtgacctgtgagggttgctggaggtatcagaagtgcgaatgctgacataagtaacgataaagcgggtgaaaagcccgctcgccggaagaccaagggttcctgtccaacgttaatcggggcagggtgagtcgacccctaaggcgaggccgaaaggcgtagtcgatgggaaacaggttaatattcctgtacttggtgttactgcgaaggggggacggagaaggctatgttagccgggcgacggttgtcccggtttaagcatgtaggctgattgtccaggcaaatccggataatcaaggctgaggtgtgatgacgaggcactacggtgctgaagtaacaaatgccctgcttccaggaaaagcctctaagcatcaggtaacattaaatcgtaccccaaaccgacacaggtggtcaggtagagaataccaaggcgcttgagagaactcgggtgaaggaactaggcaaaatggtgccgtaacttcgggagaaggcacgctggtgtgtaggtgaagcccctgcgggtggagctgagaccagtcgaagataccagctggctgcaactgtttattaaaaacacagcactgtgcaaacacgaaagtggacgtatacggtgtgacgcctgcccggtgccggaaggttaattgatggggttatccgtaaggagaagctcttgatcgaagccccggtaaacggcggccgtaactataacggtcctaaggtagcgaaattccttgtcgggtaagttccgacctgcacgaatggcgtaatgatggccaggctgtctccacccgagactcagtgaaattgaactcgctgtgaagatgcagtgtacccgcggcaagacggaaagaccccgtgaacctttactatagcttgacactgaacattgagccttgatgtgtaggataggtgggaggctttgaagcgtggacgccagtctgcgtggagccaaccttgaaataccaccctttaatgtttgatgttctaacgttggccccttaccggggttgcggacagtgtctggtgggtagtttgactggggcggtctcctcccaaagcgtaacggaggagcacgaaggttagctaatcctggtcggacatcaggaggttagtgcaatggcataagctagcttgactgcgagcgtgacggcgcgagcaggtgcgaaagcaggtcatagtgatccggtggttctgaatggaagggccatcgctcaacggataaaaggtactccggggataacaggctgataccgcccaagagttcatatcgacggcggtgtttggcacctcgatgtcggctcatcacatcctggggctgaagtaggtcccaagggtatggctgttcgccatttaaagtggtacgcgagctgggtttagaacgtcgtgagacagttcggtccctatctgccgtgggcgctggagaattgaggggggctgctcctagtacgagaggaccggagtggacgcatcactggtgttcgggttgtcatgccaatggcactgcccggtagctaaatgcggaagagataagtgctgaaagcatctaagcacgaaacttgccccgagatgagttctccctgagactttaagtctcctgaaggaacgttaaagacgatgacgttgataggccgggtgtgtaagcgcagcgatgcgttgagctaaccggtactaatgaaccgtgaggcttaaccttacaacgccgaagatgttttggcgatttgagagaattttcagctctgatacagattaatcgatacgtcggtgagacgtgttgataaaacagaatttgcctggcggcactagcgcggtggtcccacctgaccccatgccgaactcagaagtgaaacgccgtagcgccgatggtagtgtggggtctccccatgtgagagtagggaactgccaggcatcaaataaagcagaaagcccggtcgaaagaccgggctttttgttttatctgttgtttgtcggtgagcgctctccagagtaggacaaatccgccgggagcggatttgaacgttgcgcagcaacggcccggagggtggcgggcaggacgcccgccataaactgccaggcatcaaacaagtgaagagcccatcctgccggatgggctttttgcgtttctgtcgtccggccagcgtgccggtatgcctccccggtggcgctgcgcttgccggggctacggatccgacacggggctacgtcccagtggccggacaaggtgcgcagcaccgcctccgggaaaatccctcctatatcaccgtcgataaatgactattgcctctctaaccaactcacaataaatgtcgcgatctgtggtacatcatttaaatccagcagcggaagtgaggtcgcgatcgatacatcgctggccacggcgatggtatgctcatcaattaccagctcttctacacgatggccgctgttttgccgaaaaagcaggatcttcggcacgggttcatgtttgaacccctccactaaaaccaggtccagtttgctggcatccattcgactgaccagccacgtgagatctaattccggcttctctggcgtctcggtcatcaatgcccaccgctgttcgctggcgacaatagtttgcgcagcgcccgccttacgcagttcatagctatctttgcccggcttatccacgtccatatcatgatgggtgtgctttatcagtcccgggcgtaatcctagagcgcaaagctcagggataagacgctttaataatgttgtttttccggtaccgctccatgcggcgatcgccagtaatgggatcatgatggctcctgcatctgctgcaaatcttcgagcgtatttacattaatgaaagcagttttcacatcgctgaaattcaccgggcgcccacccatttgtcgcataaaaaccatcaccctgcgctctccatgtgccagataagcctccagttccggaatgatttgacgatgaactaatgcaacggcaggatgatcccgttcgccgtcatgggcccaaacgactggtgcgtcccctctctgctggataaagcgctccaccaaaaaggacggaatgaacggcgtgtcgcaggggcaaaaaacaaaccatgggctcgcgacctgctgcatcacagcaagcattccggccagcggcccctgataaccctcctgtatgtctcgaaagaccggatatccgctggcacgccactgttcaagatgacgattggcgctaatgactaactcatctacctgcggggctaatgcttccgcgacgtgtcgccagagagggcgaccatttagcgcctgtaatcctttatcaatgccgcccatccgcgtggccctgccgcccgccagcacgacgccggttatcgcctcgctttgcatatgaatatcgcctctttcattgtgggattgaccctgttaacttgtccctatcaagagtaaggagcatgaccatgaaatgtaaacgtctgaatgaagtaattgaactcctccagccagcctggcaaaaagagcctgaactgaacctgatgcaatttttgcagaagctggcgaaagaggccggctatgatggcgaactgagcgatctttccgacgatattctgatctatcacctgaagatgcgcgactcttccaaagatgctgtcatcccgggtattcagaaggattatgaagaggattttaaaaccgcgctgctgcgcgcccgcggggtaataaaagagtaaaaggttgtaagcgctaccgcgtaaagtgcaatgagatgatatcctgaactattcgtacgattatcggatgtcaggatgcacgataaggcttttacttttcagacgcttcgcccggataccattatcgatgggttattcgatctgggtatgcgggtggactccggtctcaccccgctaaacagctatgagaaccgcgtttatcagttccaggacgaagagcgccatcgctatgtggtaaagttctatcgtcctgagcgctggtccgcagaacagatccttgaagaacaccagtttgcgcttcagcttgtagaagatgaagtgcccgttgctgcgccgctcttatttaatgacagcacgcttcatcagcatcagggattctactttgccgttttcccaagccttggcggtcgtcagttcgaagcggataaccttgatcagatggaatgggttggccgctacctggggcgcctgcaccagactggccgcaaacagcgctttactgcccgcccggaaattggcgtgcaggagtacctgctggaaccgcgtcaggtgtttgagcaggcgacgctgatcccctctggcctgaaggccgatttcctgaaggcgaccgataaactcattgctgccgtcatggagcaatggcacggccgcgggaacacgttgcgcctgcacggtgactgccatgccggtaatatcctctggcgcgacggaccactgtttgtcgacttagacgatgcgcgcaccggcccggcgattcaggatctgtggatgctgctcaacggcgataaggctgaacagcgtatgcagctggagactattgtcgaggcctatgaggaattcagcccctttaacagcgatgaaatcgcgctgattgaacctttacgcgctatgcgactggtttattatctggcgtggttgctcagacgctgggacgatcccgctttcccggtcaatttcccctggttaaccggggaggattactggcggggacagacgtcgacttttcttgagcaggtgaaggttctacaggaacccccgcttcagttaacgccaatgtattaatgtgatatatccaggagagagtaaatcatgaaaaaagtttggctggcgctggctggtatgattctggcttttagtgcatccgctgcccagatcaccgacggcaagcagtacatcacccttgataagcctattgctggcgagccgcaggtgctcgagttcttttcgttctactgcccgcactgctaccagtttgaagaagtgctgcatgtctctgacaatgtgcgccagaaactgccggaaggcactaaaatgaccaaataccacgttgagttcctgggtccgctgggcaaggatctgacgcaggcatgggcggtggccatcgcgctgggcgttgaagacaaaattactgcgccgatgttcgaagccgtgcagaaaaaccagactgtgcagagtgtggctgacattcgtaaagtgtttgtcgacgctggcgtgaaaggggaagactacgatgccgcatggaatagcttcgtggtgaaatctctggtcgctcagcaagagaaagcggcagccgatctgcagctgcagggcgtaccggctatgtatgttaatggtaaataccagctgaatccgcaggggatggacaccagcaatatggatgtcttcgtcgctcagtatgcggataccgtgaagcaactggtagagaagaaataaaaaaacgccggtcactgaccggcgttactttatctgttttgcaatagctaccgttctttgtcccgcatgatgtcagtcaactgacggtctttctcttcccataggccattcagccagcgctggaagctgcgcttaaagttcttatcgttaacgtaatcgccgtgcagctcttcgccaatagggaccagattgatacggaccacaatgcgcgtcaggcggccgcttaacatatcgtaaaatggtcttgtatgattatccgggtagcacagcgtgacgttcagcagtttatcgaactgcgaaccgagtacgttgagcgccatggcgataccagcggctttcggcggtaacaggttgtggtaaggagagcgcgtttcgcgctttttttcttcggtaaaacgcgagccttctacaaaattgacgatagtcgtcggatgcgcgcgaaatttttcacacgaacggcgggtggtttcgacatctttaccgcggcgctccgggtgacgaataagatagctgcgcgagtagcggcgcataaaaggcatatccagcgcccagcaggcgaggccaatgaagggtacccacgccagctgttgtttaaggaagtacttattcatcggaatatgcttgcggaacagcacgcacagcaccacgatgtctgcccagctgtggtggttgctgatcagcagataccagttctttttgttcaggccttccagaccctggacgtcccattttagccagggattgagatgcaacagcagcgccagcccttcgcaccagcagtacatcataaaattgcaaaaaacggatatagagcgccataccgctggaatggggaccagcagtttaatcagcccggcgacgatgatcggtacagagcagataatggtgactaagatggttaaggcgatactcagcggaagtgttatcgcagcgagtaatctcgacatagttagtttattcagaaagttaggctgacaaagagcgcctttaagctgcgcaagaggctgattttaccagaaaacgcggcaaatgacgggtcttaccagaacagaaaaaaacaaggatcttctatccacatggaagattaggtcatcaaattaatgccaggatcgttgatctgtttttaagtggttgataaatagtaaataatactatttattcatttattttcaggggcggataagctgacgttgtaaaactatgcacaaagttatccacaagctaagttgtcgcgcgatcgcgacgatcgttgaatcttttccgcgaattgcgggaaaaattcaggatttcatgcccgtctgtggcatcctttatccataatctgataaacaggcacggaaattatggttcagatcccagaaaaccctctcatcctcgttgacggctcctcctatctttatcgggcgtatcatgcgtttccgccgctgactaacagcgcaggggagcccaccggggctatgtacggcgtactgaatatgctgcgcagtttgatactgcagtatcaaccgactcatgccgtcgtggtctttgatgcgaaagggaaaaccttccgtgatgaattgttcgagcattacaaatctcaccgcccgccgatgccggacgatctgcgcgcgcagattgagccgttgcataagatggtgaaagcgatggggctgccgctgatggctgtcccgggcgtcgaagctgacgatgtgattggcaccctggcgcgggaagcggaaagggcaggtcgcccagtcctgatcagcaccggcgataaagacatggcccagctggtgacgccgggcatcaccctgatcaataccatgaccaacactatcctcggaccggatgaggtggttactaagtacggcgtcccgccggagctgattattgatttcctggcgctgatgggcgactcctcggataacattcccggcgtgccgggcgtgggcgaaaagaccgcccaggcgctgctgcaaggcctcggcggtcttgatacgctgtatgcggaaccggagaagatcgctgaactgagcttccgcggcgcgaaaacgatggcggcgaagctcgagcagaacaaggacgtggcttatctctcttatcagctggcgaccatcaaaaccgacgtcgagctggagctcacctgcgaagagctggaggtgcagccgccggcggcagacgatctgctggcgctgttcagacagtatgaatttaagcgctggaccaccgacgttgaggccggaaaatggctgcaggctaaggggggcaaaccggctgcgaaacctgcagtgcctgcagcagcggcagaagcggaagaagaggttgaagccgctactgcactttcagcagagcattatgtcactatccttgatgaggctacgctgctcacctggatcgataagctgaagcaggcgccgctctttgcctttgatacggaaaccgacagcctggataacatctccgccaacatggttggtctttcattcgctgttgagccaggcgtggccgcctatgtcccggtagcgcatgattatcttgatgcgccggatcagatcccgcgcgagcgcgtgctggcgctgcttaaaccgctgctggaggatgagaaggtgctcaaggtcgggcaaaatctcaaatacgatcgcggcattttggctaattacgacattgagctgcgcgggattgcgttcgataccatgctcgagtcttacattctcgacagcgtggcgggccgccacgatatggacagtctttccgaccgctggctgaaacataaaaccattaccttcgaagagatcgctggcaagggtaagaatcagctcacctttaaccagattgcgctggaagaggctggtcgctacgcggcggaagatgccgacgttacgctccagctgcatctgaagatgtggccgaagctacagcagcatgaaggcccgctgaatatcttccagcatattgaaatgccgctggtgccggtgctgtctcgcgttgagcgcaacggcgttaaaatcgaccccgccgtgctgcatgcgcactcgcaggaaattgcccagcgcctggttgagctggagcagcgagcacatgagatcgccggggaagcgtttaatctctcctccaccaaacagctgcaaacgatcctgtttgaaaaacagggtatcaagccgctgaagaagacgccgggcggtgcgccgtccacctctgaagaggtgctggaagagctggcgctcgattatccgttgccgaaagtgattctggagtatcgtgggctggcgaagctgaagtcgacctataccgataagctgccgctgatgattaaccccaaaacgggccgcgtgcatacctcctatcatcaggcggtcaccgccaccggccgtttgtcgtctaccgatccaaacctgcaaaacattccggtgcgtaacgaagaagggcgccgtattcgccaggcgtttatcgcgccggaagattacgtcattgtctcggcggactactcgcaaatcgagctgcgcattatggcgcacctgtcgcgggataaaggcctgctgaccgccttcgcggaagggaaggatattcaccgggcgacggcggctgaagtatttggcttaccgctggacagcgtcagcagcgaacagcggcgcagtgcgaaagccatcaacttcggtctgatctacggcatgagcgcctttggcctggcccgccagctgaacatcccgcgtaaagaagcgcagaagtacatggatctttatttcgaacgttatccgggcgtcctggagtatatggagcgcacccgcgcacaggcgaaggagcaagggtatgttgaaacgctggatggccgtcgactctatttgccggatatcaagtccagcaatggcgctcgtcgtgccggcgcggagcgtgcggcgattaacgccccgatgcaggggacggctgcggatattatcaagcgggcgatgattgccgttgatgaatggctgcggagcgagaaacctcgcgtgcggatgatcatgcaggttcacgatgaactggtctttgaagtgcataaggatgagctcaatgccgtatcgaaaaagatccacgaactgatggagaacagcactacgctggcggtaccgttgctggtggaagtgggcagcggcgaaaactgggatcaagcgcactaagtatacaaagcgcaacgcgattttctgtaagtaagcaacataacttatagagttttgtgaggatcatttgaatttgctatgtaaatagtgaaaaaaaactacaaaaaatgctttatccgtgagcgaaagaagagtaaagttattcgcgtagggtacagaggtaagatgttctatctttcagaccttttacttcacgtaatcggatttggctgaatattttagccgccccggtcatttatgaccggggcgttttttattgcgcgaaagaaaagttttaggctgtgaaaacaacgtagtatgaacgtccggatagggcgctacgcgccgttatccggaaaaagcgggggttactcggcgtcttcgacggcttcttgcggcgggatttcgttaaaccagctatccagcttctgtcgcagcttatcgacgccagattttttcagcgaagagaagggttcaacctggacatcgccattgaaggccagtaccgcttcacgcaccatattcacttgcgctttacgcgcgccgctggcgagcttatcggctttggtgagcagtaccagcacctgaatatcgctctctaccgcccattcgatcatctgctgatcgagatctttaagcggatgacgtatgtccatcagcaccacgagacccttcaggcatagacgtttttccaggtattcccccagcgcgcgctgccacttgatcttcatctcttcgggtacttgcgcataaccatagccgggcaggtcgacaaggcgcttgccctcagcgacttcgaacaggttaatcagctgcgtacgccccggggttttggaggtacgcgccaggttcttctgattagtcagcgtattcagcgcgctggattttcccgcgttggagcggccggcgaacgccacttcaataccggtatcggcaggaagatggcggatatctggcgcgctagtgacaaagtgcgtcagttgataattccagttggtcaagacggtcgtctccgttaaaacaggctatggcagggattatacctgaacagcagaaaaaggctgtttttaccgcacgccgtttctgtaagtaaaaaccatatggtttgtgagacattgactattctttgtataggatatacctgaggaaaataagacaaaacatacttaatgtgttgaaaattaatgaattatagaaatagagaattctgaaaatagatttttaactgccagactggttgtcgatttttgtcaacaaggtaaagtaatacacaacggcggggatgctgaaaggattaggactcaggacgaggagtcaggaagcgccaggaggcgaagaccacaggatagtcaggatgacgcgcgtcttggagacgttttacagggaaaaggaagaaacagggaccgttggacgctaagggaaagacagggtgagtcgttagcgaacagggaaagaagagcccgttaagggtggtcagtgaggaaaaaggcgacagagtaatctgtcgccttttttctttgcttgctttctgctagattccgcctcaattctatactgaatactactgtctgaagattacacatcatgaaaaaaccgacatccgccacccgtggcaaatccggccgcaagtcgcgtgaagagttaaatcaggaagctcgcgatcgcaaacggcagaagaaacatcgtggccacgcggcaggcagtcgcgcgaacggcggcgatgcggcttcagcgggtaaaaaacagcgtcaggcgcaagatccgcgcgtgggtagcaaaaaaccgatcccgctgggcgtgagcgaaagcagcgctccagcccccaagcagcataaaccaaagagcgagaaacctatgctttcaccgcaggctgagctggagttgctggagaatgatgagcgcctggacgcgctgctggaacgtctggaagagggcggcaccctgaatgctgaagagcagagctgggtggacgccaaactggatcgcattgatgagctgatgcagcagctcggcctctcttacgatgatgaagatgaagaagaggaagagcgtcaggaagatatgatgcgtctgctgaagggtggaaactaacatttgcatcccatcggattcccggtactccttataacccttctggttatatgttatctgctgtggttattcgttaaactacgacggttgtcgcggcgtcagaaatggctgcgcaaccggctcatgacccgcggtgcggtggggccgggacggcgtacccgtcggcggcaccatcggaaggagtgagcatgtctgagcagataatcgactgggatctggccctgatccagaaatataactattccgggccgcgctatacctcgtatcccaccgcgctggagttttcaccgcaatttggcgcggcggaattcgatgccgctgtggcccgttacccacagcgtcccctgtcgctgtacgtgcatatcccattttgccataagctgtgttatttctgcggctgcaataagatagtcacccgccagcagcataaggccgatcaatatctcgatgtccttgagcaggagatcatccaccgcgcgccgctgtttgccactcgccaggtgaagcaactgcactgggggggcggcacgccaacttatctcaataaggcgcaaatcagtcgcctgatggatctgttgcgcagccattttcatttcagcgcggaagccgagatctccattgaggtcgatccgcgtgaaatcgagctggatgtcctcgatcatttacgcgctgagggtttcaaccgcctgagtatgggcgtacaggacttcaataaagaggttcagcgtctggttaaccgtgagcaggacgaagcgttcatctttgatttgctcaaccatgcgcgggagattggttttacctcgaccaatatcgacctcatttatggcctgccgaagcaaacgccggagagcttcgcctttaccctgcaaaaggtcgccgagctcaatcctgaccgcctgagcgtgtttaactatgcgcatctgcccacgctctttgccgctcagcggaagattaaagatgccgatctgccctccgctgagcagaagctggagatcctgcaggaaaccatcggctcgctgacgacggcaggctatcagtttatcggcatggaccatttcgcccgtcccgatgatgaattagcggtcgcgcaacgtcacggcgtactgcatcgtaatttccagggctacaccactcagggcgataccgatctgctggggatgggcgtttcggcgatcagcatgattggcgacagctacgcccagaaccaaaaagagctcaagcagtactaccagcaggtagcagagcaagggaacgccctgtggcgcgggatcgcgttaactcgcgatgactgtctgcgtcgcgacgtgattaaggcgttgatctgtaacttccagctggatatcgcggcggtcgaggcgcagtgggacgtggattttgcgtcttatttcgccgaggatctgaagctgctggcgccgctggcgcatgacgggctggtggctgtggatgataaggtcattcaggtgacggcgaaaggccgcctgctgatccgcaacatctgtatgtgctttgatgcctacctacggcaaaaggcccgaatgcagcagttctcacgggttatttaatattttccccctctcccgcaggagagggggaacaattagctgaacagcccgaccagcgcagcgcacagcacggcagcgactgccgtttgtggcgtgtgactcgcagcggcgccgctcgatatcatactcaccagtgattcaaacatgatgctctcccctaatgccgggcacgatcatactcaactcatcggaacagtaaagtacaaaatagcagcactttgcgccgatcggctatttttcatcatgctgttgaaccctactccatacccaactcttttagcttacgcgtcagggtattacgtccccatcccagcaggcgcgcagcctcctgcttgtgcccctgagtatggcgcagggcggtcgttagcagcgtgcgctccatttcgggttgcgcttctgagagcaggttttgatgaccggatcgcaacgcccgatcggcccactgacccagcagcgtagcccagctgtcaggctgcatctgcgttgggctatcaggaatcgtggtctcaaacagttcgctcggcagatcctgcgtcagcacctcctggccggcggccatgacggtgagccagcgacaggtgttttccagctgacggacgttgcctggccacgccaggcgggtcagcgctgtctccgtttccggatgcagctgtttggcttcaacgccgagctcgcgggcggctatctgcaggaaatggcgggccaggcgtggaatatcttcccggcgctcgcgcagcggcggtaaatgcacccggatgacgttcaggcggtggaacaaatcttcacgaaatttcccctcctgcacgcgctgttccaggttctggtgggtagcggcgatgatccgcacatcgaccttcaccggcgcgtaaccgcccacgcgataaaactgaccatccgccagcacgcgcagcagacgagtctggacatcaagcggcatatcgccaatttcatccaggaacagcgtaccgccgtcagcctgttcaaagcgaccctgacggacggtattggcgccggtaaaggctcctttttcatggccgaacagctcggactcaatcaggtccttggggatcgccgccatattcagcgcgataaacggcgcttttgagcgtggactatggcgatgcagggcatgtgcgacaagttctttaccggtaccggattcgccattgatcagcacgctgatggatgagcgcgacaggcggccaataatgcgaaagacatcctgcatagctggcgcttcgccgatgatgtcggcagttgggctacttatcggcgcatttcgcggctgctgctgctcttgatagtggcttatcgcccggtcgacgagggcgacggcttcatcgatatcaaaaggtttgggcaaataatcaaacgcgccctgctgataagcgctgaccgcggcgtccagatcggaatgcgcggtcattatgatgaccggaagcattggatggcgctgcttaatctgtttgagcagcgccagaccatccattcccggcatacggatatctgacagcagtacatccggggttttggtggtgagggcatctagcacctcattgccgctttcgaacgttgtgcagctcaagccggctccggtgagcgcgcgttcaagcacccagcggatggagctatcgtcatcaacgatccaggctatccctcgttgcataaacacctctacttccgaataggcaggtataccgaaaattcggtatgacccggccagctggtgaattcaattttgccggagtgctgatcgataaggctacgggcgatagataagcccaggccggtaccgccttcgcggccgctgaccatcggatagaacagcgtatcctggagatggggcggaatacccgggccattatcttcaacgtcgatgcgggcggcgaggcgataacgcaccccgtgcagcgtcagctggaaagcggtgcgggtgcgaagaataatttcgcccccttccggccccagcgcctgcagcgcattacggacgatgttcagcaacacctgttcaatttgatccgggtcgtggggtagctctggtaggctggggtcgtaatcgcggatcaacttcacgttgtccggcaactccatggaaaccagtttaactacccgttcggcgactttgtggatgctttcggtaacgtgcatgcccggatgctgtggtccgagcaggcggtcgaccagatttcttagccggtcggcctgctcaatgatcactttggtatattccgttagcgccgggtcgggcagcgctttgctgagcagctgggccgcgccgcgcaggccgcctaacgggttttttatctcatgcgccaggccgcggacgaggtcgcgagcggcgacctgctgcgcatgctgcagctgctcctggctcaggcggcgctgattatccatcggcgccatttccagcagaataaagccttccggcagccgctgggcggtcaacgacaggatgtgcgaacggccatcgataaccaacgtcacttcgttatcggtaaacccctggcccgcctgcagactctcctgcatcagcccgatattcaacgaaaaatagctcaacagctcaggtaatggggtgccaaacagtttgcgcgagctctgcgccagcagctgctgcgccgcagggttggcaaagtgcaccgccaggtcatcatcgaccagtaaaatactgttgataagggagttaaggatctgcccagcatcgggcagtgtgcctgttgccattcgacagtctcctgaaaatgagtgcaccaatttagtgcagtatagctttttatcggtaaaaagctcgcgagatcagcgtgttggtggagaaaaaagcccatcctgagatgggctgaaagtttccacggcaacaaaatatcccgggcatctcgcgccacaacacgacataccctggatttacagcaaaattagacgctgtagtacagttcgaactcaaccggatgcggagtcatgcgtacgcggtcgttctcttccatacgcagggcgatgtaggcatcgatagcgtcattggtgaacacgccgccagcggtcaggaactcgcggtcagcatccagggcctgcagggcttcttccagagaaccggcaacctgcgggatctctttcgcttcttccggcggcaggtcatacaggtttttatccattgcttcgcccggatggattttgttcttgataccatcaaggccagccatcagcagcgccgcaaagcacaggtacgggttggcagccgggtccgggaagcgcacttcgatacgacgcgctttcggagaggtcaccaccggaatacggatagaggcagagcggttacgggcagagtaagccagcataaccggcgcttcgtaacccgggaccagacgcttgtaggagttggtggtcgggttcgccagggcgttgatggctttagcgtgtttgattacgccgccgatgtagaacagcgcctgctcagacagaccggcgtatttgtcgccggagaacaggttggtaccgtttttcgccagagacatatggcagtgcatgccggagccgttgtcgccgaacatcggtttcggcataaaggtcgcggttttaccaaagcggtgagcgacgttgtgaacaacgtatttgtaaatctgaatttcatccgcttttttggtcatggtattgaagcgggttgccacttcgttctgacctgcggttgctacttcatggtgatgggcttcaacaaccagacccatctcttccatgatcatacacatggtggaacggatgtcctgagaagagtctactggcggaaccgggaagtaaccccctttcacgcccggacggtgacctttgttaccgccttcgtatttggtggaggagttccacgcaccttcaatgtcatcgatcgcgacatgggagcccgagatagaggcgccaaaacggatgtcgtcgaacaggaagaattctggttctggcccgaacaggacggtatcagcgatgccggtggcgcgcaggtactcttcagcgcgtttcgcgatggagcgcgggtcacggtcatagccctgcagggtgcctggctcgaggatatcgcagcggatgatcagggtcggttcttcgtagaacgggtcaatgaccgcggtggacgcgtccggcatcaggaccatgtcagattcgttgatacctttccagccaccaatcgaggagccatcaaacattttgccttcttcgaagaattcggcatttacctgatgagacggaatcgtgacgtgctgttctttacctttggtatcggtgaagcgcagatcgacaaacttcacttcgtgctcgttcagcatcgtcaaaacgtgttcagcggacatacttaaactctcccggattggtcattgtcgtcgtggtaacgaaaacttcatactgcttaaaagtggcgttgttgccttaaaaaatataaagcgaaatctgtgccaacttttaaatgccctataaaacgctgtatcatgcgcaccatagtgcaaaaggactgcaccatgatggagataatgcaccaaaatagtgcttcagtgtgaacattgagcaccattttggtgcaatttttgttacggtgcccttttatcgctccgtgaaagcggtcacaaagaaactctgcaatacttgtttgcggaggatgtttgtgatcctgttcagtccttcgcttaatacgtgtacaataacgcgctatttctaatgcctgaggcaaagttgtgatcgaaaatctgcgtaatatcgccatcatcgcgcacgttgaccatggtaaaactaccctggttgacaagctgctacagcaatccggtacgttcgacgcacgtactgaagcacaagaacgtgtgatggactccaacgatttggagaaagagcgtgggattaccatcctcgcgaaaaacaccgcaatcaaatggaatgattaccgtatcaacatcgttgataccccagggcacgccgacttcggaggtgaagttgagcgtgttatgtccatggttgactctgtgctgctggtggtagatgcctttgatggcccgatgccgcaaacgcgcttcgtgaccaaaaaagcttttgcccacggtctgaagccgatcgtggtcatcaacaaagttgaccgcccgggcgcgcgtccggactgggttgtcgatcaggtgttcgacctgttcgttaacctcgatgcgaccgacgaacagctggacttcccgatcgtttacgcgtccgcgctgaacggtatcgcgggtctggatcacgaagacatggctgacgacatgaccccgctgtaccaggcgattgtcgatcgcgtgccggcgccggacgttgatcttgacggtccgctgcagatgcagatctcccagctggactacaacaactacgttggtgttatcggcatcggccgcatcaagcgcggtaaagtgaagccgaaccagcaggtcactatcatcgatagcgaaggcaaaacccgtaatggtaaagtcggtaaggtactgactcacctgggtctggagcgaattgagagcgacgtagctgaagctggcgacattatcgcgatcaccggtctgggcgagctgaacatctccgacaccatctgcgacccgcagaatgtcgaagcgctgccggccctgtccgttgatgagccgaccgtttccatgttcttcaacgtcaacacctctccgttctgcggtaaagaaggtaagttcgttacctctcgccagatcctggaccgtctgaataaagagctggtgcacaacgtggcgctgcgcgttgaagaaaccgaagacgctgatgcgttccgcgtttccggccgtggtgaactgcacctgtccgttctgattgaaaacatgcgtcgtgaaggtttcgagatggcggtttcccgtccgaaagttatcttccgcgaaatcgacggccgtaaacaagagccgttcgagaacgtgacgctggacgtcgaagagcagcaccagggttctgtcatgcaggcgctgggcgagcgtaaaggcgacctgaaaaacatgaatccggacggtaaaggccgcgtacgtctcgactacgtgatcccaagccgcggtctgatcggcttccgttcagagttcatgaccatgacctccggtaccggtctgctttactccaccttcagccactacgacgacgttcgtccgggcgaagtgggccagcgtaacaacggcgtactgatctccaacggtcagggtaaagcggtagcgttcgcgctgttcggtctgcaggatcgcggtaagctgttcctcggccacggcgctgaagtttacgaaggccagatcatcggtattcacagccgttccaacgacctgacggtaaactgcctgaccggtaagaaactgaccaacatgcgtgcgtctggtactgacgaagccacggttctggttccgccggttaagatgaccctggagcaggctctggagttcatcgatgacgacgaactggtagaagttactccgacctctatccgtatccgtaaacgtcacctgaccgagaacgaccgtaaacgcgcgatgcgcggtgcaaaagaagagtaattttttcttcttgttgttcgctaaaccccgcctctccggcggggtttctttttttcattcctgcatcacacgccaatagtcaaatccagcctttcccgctaaagttaattttccacggcgcggaaggagacaaaaatgctctatatctttgatttaggtaatgtgattgtcgacattgacttcaaccgggtattgggagcctggagcgatttaacccgcatcccgctggcgacgctgaagcagcatttcaccatgggtgaggctttccatcagcatgagcgcggcgagctcagcgatgaagactttgccgccgccatgtgccatgaaatgaatatgcccctcagctatgaacagtttgctcacggctggcaggcggtatttgtcgcgctgcgcccggaggtaattaccatcatgcataaacttcgtgcccaggggcatcgggtggtggtgctctccaataccaatcgtctgcacaccacgttctggcccgatgaatacccggaagtgcgcgcggccgccgatcgcatttatctgtcgcaggagatgggattgcgtaagcctgaagcgcaaatttatctgcgagtactggaggaagaggggttttccgccgcagatacggtcttttttgatgataacgtcgataatatagcaggggccaaccggttggggatcaccagtatcctggtgactggtaaggagaccatccctgactatttcgcgaaacagctatgctaaaaaccgttcatcaaaaattactccaccatacccggccgctgctggcgtggctaaagctgctgtggcggcgcattgatgaagaccatatgaccaccctggcggggaacctcgcctatgtgtcattactgtccctggtgccgctgattgccgtcgtgttcgcgctgtttgcggcctttcctatgttctccgaagtcagcgtgcagatccgtcattttatcttcgccaattttattccggcgaccggggatgtaatccagggatatatcgagcagttcgtggccaactccagccgcatgaccgccgtaggcgcctttggcctgatcgtcacctcgctgctgctgatgtactcgatcgacagcgcgctaaacaccatctggcgcagcacgcgcagccgccccaaagtttattcctttgccgtttactggatgatcctgaccctcggcccgctgctggcgggcgccagcctggcgatcagttcctatctgctgtcgctgcgctgggcaagcgacctggacggcgtaattgataatctgctccgcctatttccgctgatcctctcctgggcagcgttctggctgctctatagtattgtaccgactacccaggtacgtaaccgcgacgcggtgatcggggcgctggtggcggcgctgctgtttgaggcaggtaaaaaggcgtttgccctctatatcaccacctttccgtcctatcagctaatttatggcgtgatttcggtggtgccgattttgttcgtctgggtgtactggacctggtgtatcgtcttgcttggcgctgaaattactgtcactctcggtgaataccgcaaacttaaaacagaagaaacagaacaaccatgattgcattaattcaacgcgtatcccgtgcaagcgttaccgtggcggacgaggtgacgggcgaaattggcccggggcttctggtgctgctgggcgtcgagaaagacgatgatgaacaaaaggcgaatcgcctttgtgaacgcgtgctgggctaccgcatcttcagcgatgcggaagggaaaatgaacctgaatgtccagcaggcgggcggcagcgtgctggtggtttcgcaatttacgctggcggccgataccgagcgggggatgcgaccgagcttctcgaaaggcgctgcccctgaccgcgctgaggcgctgtatgagtatttcgtcgcccgctgtcgccagcaggaaatgcacacccagaccggaagatttgctgcggatatgcaggtttctttggtcaatgatggtcccgtgaccttttggttgcaggtatgacccagcttccgggcaggctgcgggtaacaaaagagagtacgactatgtatcaccttcgtgtaccgcaaacagcagaagagttagagagctactaccagttccgctgggagatgctgcgtaagccgctgcatcagcctaagggatcggaacgtgacgcctgggatgcgatggcgcatcatcagatggtagtggatgaagagggcaacctggttgccgtcggccggctatatatcaatgcggagaatgaagcctccatccgctttatggctgtgcatccctcggtgcaggataaagggctgggtacgctgatggcgatgaccctggagtccgtcgcgcgtcaggaaggggttaagcgggttacctgcagcgcgcgcgaagatgcggtggaatttttcgccaagctcggatttgtcaatcagggtgagatcaccaccccgaccaccacgccgatccgtcattttctaatgatcaaaccggtcgcgtcgctggacgatattttgcaccgcggcgactggtgcgcacagctccagcaggcgtggtatcagcatattccgctgagtgaaaaaatgggcgtacgtattcagcagtacaccgggcagaaatttattaccaccatgccggaggcggggaaccagaatccgcaccatacgctgttcgccggcagcctgttttcgctcgctaccttaaccggatgggggcttatctggctgatgctgcgcgagcggcacctgggaggcaccattattctggcggatgcgcatatccgctacagccagcctattagcggccgccccagcgccatcgccgacctcggttctctgagcggcgatctcgaccgactggcgcgcgggcgtaaagcccgcgtgcaaatgcaggtggagctttttggcgacgataaacagggcgccgttttcgaggggatctacatcgtgctgccggcgaagccctttggctcgtacgaagagggcggcaacgaggaagagtaagcgcctgcggcagttatcgtcctggcgatgccacacgccaggcgatatcccgcatggcatcacgcgcggcgttgctgacgcctcccagctgaaagaagccgtggatcacccccagatagcgctgacaggaactctccaccccttgctccgtcagccttcggtacagcacttcgccctcatcacgtaaaggatcgaactccgccgtcaggatgtggaccggtggcagaccgtgaaaatcttcgcgccacagcggactggcatccggatgggtagcgggtgtggccgctaaatacatttcgtagccgctaagcagcgtgtcccgggtaatgatgtaatcctcgccgttgctggcgtagcttgccatgctggcggtagcgtcgagcatcgggtaaatcaggataagctgtgcaggctgccatgttcccgccgctttcaggcgcagagccgtgaccagggcgagatgcccgccggcgctgtcgccggccagggtgatgcgcgaagcatccacgccaagctgttttgcgtgctggtgaataatcgtggcacctcgttctgcatcatcgtgcgccgccggaaaggtatgctccggcgccaggcggtactgtacagcgatcacccggcaaccgctgaacatggctaactgacggagttggttatcgtgggtggtaaagccgccgctgacaaaacagccgccgtggtagtagataagcgtgggtagcaggccgtcggctgtgggcggtgaaacgacgcggaagtgcataccctccagggtgatatcctccacccgcactcgcgtttccgtctccccggcgagtaccgcactggcgatatagccggccctccgatcatcaatatgctgatcgcgtgatgacggacgacctgccgcaataaatgcctcaaccagcgaagcaatccctttttccagcgccatatgaagttccttatactgttttaatatccagtgttatagcctggattatggcgaaaagacaggcctgttgaggtcgcctgtgcattatggaaagcggctcgcaaaaaagagtttacctgacaaaatcctgtttgtttccgattccaaaagctatagattgctcataacttcatcactggtgatatacttgaggtatatatgagcatgatggctgaaagggatatgggcagaattcttctcgatttatcagacgatgtcattcaacgtctcgatgacctcaaagtgcagcgtaacattccgcgagcggaactgttacgtgaagcggttgaacaatatctggagaaacaagatcgagctaaagataccatctccagtgcgctgggtctgtggcaagactgcgaagaagacggcatggaatatcaacgtcagctacgcaaggagtggtaatgacctccggatctgcgctttttgataccaatattcttattgatttatttagcgggcgtcgcgaagccaaacaggcgctggaggcctggccaccgcagaatgcgatcagtctgattacctggatggaggtgatggttggcgctaaaaaatatcaccaggagcagcgcacgcgaatggcgctgagcacctttaatatcattaacatctcacaggatattgcagagcgaagcgttgcgctgcggcaggagtataagcttaagctgccggatgccatcattctggcgacggcgcaactccatcgtctggaactaattacgcggaatacgaaggattttgccggtattcctggcgtagtcacgccgtacgaaatccaccctgaataattcgagtggcaggaggacgacaagtgagcgataaactcgtctgaaacgaatatctccagccaaaggttggcctctgataacggtcagtgacgcgtgtgaataatccctgcgcacgttcgtgtcacaagaaggaaaacgggcgacaagagccgcccgaaatcatactgcagaacttactccccttcgccggggaacatgaacgggttaattgagcttctggcgaagccctcctgttccatgcgggcgtcgagcaccagggaggccaaatcgtcggcgacggcttcgactttcggatccttctcctgatacataatcttcaggtaggttccgcagtcgccgcagctttcggctttcaccgccgcctgctcgttgtccagcgaccagtagtgcaggtcgcggctctgctcgcagttgctgcacttgacgcgtactacgtgccactcagtttcgcacaggttgcagtgcagatagcgcagcccctgagtggtgccgatttgcacgatgctggagaccggcatcgagccgcacaccgggcagaactggcgctgttcgccgtattcggcgcgcgcttttcctgggatcagactggccatctgcgcccagtagagcgacagcgcagcccagatgaacggcgctttgtcgctactgacggaggcgaaatcggaaacaaacagcgcgctggccatctgctccagctcctgctcagaggctttttccagattctcaatgaccgccagcgccgggccgctcatctccggcttcagctcggcaatcagcgagtgcaacagcttgtgccagtgcttgtcgcgcggcaggacgtggatatccagcggcggcttgccctgttcgctggccgctttaatgcgggcggtgagatccatctgcagcggatggtcgtacagcactacttcctgggcatgggcaatcagcgcggcaaagcgcaggtaatcgcctagcgggttattagcggccagctcgcgcaagcgttcagcgcggcggttatacagatttttcagcctggggaacagtaacggcggaattgcttccgccgtgcgtttctcgctcgaacccagctcgtcttgcgggattatgcgaatactcattcagatgacttttcctgtttctggcggacctctcggtaccagcgcgggtgatgtttcttcgcccacgttttggtaacccagccttccaccatcgcggtaatggtgcctttcacccagagggcggcgtagatatgcaccatgataaccacaattaacgccactgcggcaaatgaatgcagcatcagcgcaaatcggatcaccgggattgagaaagccggcgcaaaatacggacgccagatgatcacaccgctcaccagcagcagtaccaggaagataatcgccgcccagaatacgcatttctggccgaagttatagcgcccggtatcgcccacctcctcgttgacgacgatcttacgaatattcttcgcccaaaagatatcatcccgattgattaggttgtgatgccagtaacggaaaaacatgatgataaacgacgcgaacatcaccaccccgacgaacgggtggagaattcgcgccagctgcggcgtgccgaggatatgcatcagccagttaaaggacgggaagaaaaagcctaacccgctcaccgccgccaggacgaagcagaaggcggtgacccagtggttgatgcgttccggcgccgtgtagcgcacgatggtgtcacgtcttttcatttgcgcacctcgtctttctcttcatgcagattgtcctcttcctcttccgcgcggttcggaccgacgccgacgtagtggaagatactggctgcgaaggtcgcggcgaagccgacggccgccagcggtttccagatgcctttccagaacttgacggtctggctgatctccgggttttccggcaggccgtggtacagattcggcttgtcggcatggtgcagcacgtacatgacgtgggtgccaccgacgccggccggatcgtacaggcccgcattgtcataaccgcgggttttcagctcagccacgcgttcgccggccagcgttttcatatcctctttggagccaaagtggattgcgccggtcggacaggttttcacgcaggcaggctcctggccgacggtcacgcggtctacgcacagggtacatttgtagacgcggttgtcttccgggttcagacgcggtacatcgaacggacagccggcgatacagtagccgcagccgatgcactgctcggactggaagtcgacaatgccgttggcgtactgaatgatcgcgccttctgacgggcaggccttcaggcagcccgggtccgcgcagtgcatgcagccatccttgcggatgagccattccagcttgtcgttttgttccacctccgagaagcgcatgaccgtccatgacttggcggtcaggtccgccgggttgtcatacaccccgacattgtgaccgacttcatcacgaatatcgttccattcggagcaggccacctgacaggctttacagccgatacaggtggtgacgtcgataagcttcgccacctcctgctggtggtcccgcgcctgaggcgcgggggtgaaaccgttagtcgcggaacgacgaataatatcttgcgattggtaagccataagtcgtctccgttacaccttttccacgttcacaaggaaagctttgaactccggcgtctgcgtattcgcatcaccgacgaacggcgtcagggtattggcaataaagccttttttcgccacgccctcatagccccagtgaataggaatgccgatggtatcgatatccttaccgtcaactttcagcgtgcgaatacgtttggtcaccaccgccttggctttgatatagccgcggttggaggaaactttcacggtatcgccgtggccgatgccgagcttattcgccagtttttccccgatctccacgaactgttccggctgggcgatggcgttaagtagcgcatgcttggtccagtagtggaagtgctcggtcagacggtaagtggtgccgacgtacgggaacttctcggccttacccatctgctcgagatcgcctttgaagacgcgagcggccgggttagagaccacgttcgggtgcagcgggttggttccgagcggcgtttcaaacggctcgtagtgttccgggaacggtccttccgccatcttgtcgatagcgaacagacggcccatcccttccggctgcatgataaacggaccgacgtcgctgccaggcgcggcggcgctgtagtccggaatatccacgccgccccatttggcgccgtcccatttcagcaactgacgcttcggatcccacggtttaccctgcgggtccgcggaggcgcggttatacaggatgcggcggttgagcggccaggcccaggcccagcccagggtattgccgagaccggatggatcggcgttatcgcggcgcgccatctggttaccttccggcgtccagctcccggcgaagatccagcagccgctggaggtggtgccatcatctcgcagctgcgcaaaggagctcagctgttggcctttcttgacgatcaccgcgccggttgccgggtcggtgatatccgccagcgctttaccgttgctttccatcgccacttcttccgatgccggctcgtgtggcgtggagtagttccacgtcatgttgagcaccggctccggcgccgggccaccctcttcggcatacatcttacgcaggcgagtgaagataccggcgagaatttcaccatcggtgacggcgatccccggggcgtccgcgcctttccagtgccactgcagccagcggccggagttgacgatagacccattctcttcggcgaagcaggttgagggcagacggaacacttcggtctggattttcgccggatcgacatcgttcgactcaccatggttttgccagaaggtggacgtttcggtattgagcgggtcgatagtcacgaggaacttcagcttcgacagggaagcgacgaccttgtttttgttcgggaacgaggcgaccgggttaaagccctggcaaatatagccattcactttgccctgattcatcatctcgaagtactgcagaacgtcgtagctcttatcccacttcggcagccagtcatagccccagctgttttccgcggtggctttgtcgccgaagaaggctttcatcatggagacgaagaacttcggatagttgccccagtagttgacctggtctttcagcagcggcttcggcgtgttagccgtcaggtaggtctgcaggtcggcctgtttttcgttcggcagcgacatgtagcctggcaggctggtggagagcaggccgaggtcggtcaggccctggatattggagtggccgcgcagggcgttgacgccgccgcccgccatccccatgttgccgagcagcagctggatcatcgccatggtgcggatattctgcgcaccgatggagtgctgggtccagccgagagcgtacaggaacgatgcggtcttatccggcgcgctggtttcagcaatgtattcacagactttgaggaagtcggccttcggcgtaccgcagatgttttcgaccacatccggggtataacgggaaacatgctgcttcagcaggttccagacgcagcgcggatgttgcagcgtagtatcgcgtttggcgaagccgttttcgtccagctcatagttccagctggttttgtcgtactggcgtttttctgcgttatagccgctgaacagcccgtcgtcgaagctatagtcctcacgcacgatcaggctggcgttggtgtaggcttcggtgtattcgcggttgaatttttcgttattcagcagatacaggatcacgcccgacaggaaggtaatgtcggtaccggaacgaatcggggtatagaaatcagccaccgacgccgtacgcgtaaagcgcggatcgataacgatgagcttggcgccgttatgaattttggcttccatcgcccagcggaaccccaccggatgcgcttctgcggcgttaccgcccatcactacgaccaggttggcgtttttaatatcaacccagtggttggtcatcgcaccgcgaccaaatgttggagcaagacttgctaccgttggtccgtgtcagacacgcgcctggttatccaccgccagcatcccgagggcgcgggtgaatttttgcgttaaatagccggtttcgttactggaggcggaggcgcacagcatcccggtagtcaaccagcggttgacggtggtgccggcgtcgttttgcgcgataaagttggcgtcgcggtcctctttcatcagcttggcgatgcgatcaaacgcttcgtcccaactgatttgctgccatttatcggagcctggcgcgcgatattccgggaatttcaggcggctttcagaatggataaagtccaccagaccagcccctttcggacagagcgcaccacggttgaccggatgatccggatcgccttcgatatggaaaatggatgctttggcgtttttcgcgccgtcgccgaggctatacatcaacagcccacagccgacagaacagtatgtgcaggtgttacgggtttcgcgcgtgcgcagcaatttgtactgccgtgtctccgcgagcgcagttgccggggcaaagcccagcgctgctgccgtggttcccgccataccgccagcgcagatcttaaagaactgccttctgctgacctgcatggttcgctccttgtttcgacattgtcacatgtagttatttgctttgcggtgaaggccgcaaaggttcagaattagggcaaatttccctcattcctgaagggataaaaacagaataccacattgtgtgtatgcctgttccaatacggttaaagcaaagtgaacaagaagcctctcgaacaaatcaaaaatgtgacgaatgtcacaggatatcgccaggtctccctctggaaacgcgaggatctgcaacaccctcagccagatgagttagcggaagaggtgcccgtcgcgctggtctacaacggtatctctcacgtggtgatgatggcctccccgaaagatctggagcaattcgccgtcggcttctccttatccgaagggattatcgagcaccggcgggagattttcggcatggacgtggtagcggtgtgcaacggccttgaggtgcagattgagctctccagccggcgttttatgggcctcaaagcccggcgtcgcgcgctggccgggcgcaccggctgcggcgtatgcggcgtcgagcagctcaatgatattggtaagccggtccagccgctgccgttcactcagtcgttcgatttagccaatctcgatcaggccctggcgcatcttaacgactttcaaccggttggccggctcaccggctgtactcacgcggccgcgtgggtccggttgacgggcgaactggcgggcgggtttgaagacgttggccggcatgtcgccctggataaattgctgggccggcgggcggaagtcggcgaggggtggcagcatggcgccgcgctggtctccagccgcgccagctatgaaatggtgcagaaggcggcgatgtgcggcgtcgagatcctgttcgcggtctcggcggccaccaccttagcagtggaagttgccgagcgctgcaatctgacgctggtgggcttttgcaagccgggcagggcgacagtttacacccatccgcagcgtttaattgcgggttaaatattggtcaataaatttgaacaatgacagcaaatccttccgctttttgtttagcgatgtgcgggatactatttaacacatcaaggcacagcgccttatctaaacaactaaatgaaagggtttatatcatgaaaagcatcaaaacttttgtcgcagtaatcgctatggccgcctctttcgcttccttcgctgctgaaaccgtgaccgcaaccgcctccacaatggacggcgcggaagcgaaaatcgccgcacaggcgcaggctgccggcgcttcgtcttacaaaatcaccgaagcgtttaccggcaaccgcgtgcatatgactgccgaactgaacaaataagcgtatagcaactgtcgaaagagcgcctcagggcgctttttttgttttcgttttccgcttcccgtctctgcgaaatttgccaatattttcctctgctacgaaaaaaatgtggcactaatcacgtttccgttcttttcttaaatcctcctttttatggcaaaggaaaggtcagcacgcctgaatatctcgattttttaacgccatgaaatttaaagatattaaaaacagaaagcgatggagatcactctctttaaatgtgatatttatcacaaaaataggcgtttcgccgtacctgtcaactattcactgcggtaatttaatacgcattatgtgatcttcattgcaaatagaaggcttgtactcagggaaaaatgttgtcaggcaaatgagcgaggatgcgtcatgaaaattggtatcgttattagcggcggggatgtttctggaatgaataattttatattccagatagccaggcaggctaatgctgatatcacgctgtttaatggcggtattccagggctactggagaaaagtcatcaggatatggcgtggcgcgatctggttgattattcaattaccgcggtgccgatcattacctcggggcgaaccagtcgcaaactgcagcgcagtgaatatgaaagcattgctaaaaaacttaaatctctgcgtattgatgtgctcattatggccgggggggatggcagcctgcagtttctgaatacccttagtgaatttgagattaattgctttggtgtgggaatgactatcgataatgatgtgtatggcagtgattatacgattggtttttccacggcctgtgagcaaattattaaagaagtctctcgtttaagaaataccggaagagcgctgcccggtcgggtttttatggttgagatattaggaggctattgtggagaactaacgttgcagtccgccattaaatgtaatgcggatattgccctgatcccggaggcacagatgccgttggccgtgctcgcggaacggattacccggaagctgagtgcgcagaatagcgtcgttatcctctgctcagaaggctataccaaagagtactctcccggctttcagggggcgattgataccatgattaaacagctggaaccacaaataggtgtccgtatccgtaaaacgatcgtcggctatggtttacgcagcggtgatccaacctgcgaagagatttatcagggcactattatggccagtgaagtggttcgctgtattcagtcaggtatgaaaaataaagccataataattaattccagtaacaaacctattccgattgatttagtcagtatgaaaaaacgtctggtcgatactgaaggacatcattataaacttgccaagcaactcaatattatttgaggagaccctccatgctgaaaattttatgcgtatgtggctgcggcctcggttcaagctttgccattgaaatgacggcgaaggcagttttaaagaagctggaaattcccgctcatattgaacacaccaccgtttccgaagctggggcttttaaatcagatatgattctgacgcaaaaaacctttgccgacatcttaaccgccgatgccagtgaagaagaaattaaacgtgtcgtggtgttgaataaacttactgataaagaggagattgaaactaagatcgtcgcattcttaaaagaacgtcatctgaaggtggctgattatgaatagcttcgtggcgtttatcgttaaggatttactcggccaggcatccattcttattgcttttattgccatgcttggcctgatcctgcaaaagaaatcgccaggcaaaaccgcggaagggacatttaaaacgctgctcggtttcttaattatgatggccgggataaacatcattgtcgccacgctgaccttcctgaatgatatcttcacccagggatttggcatgaaaggctatattaccgatgtggccgccatcgccgggttagcgaatcgggaattaggttcggaggtggcgctgacgctgctggtgatctttgccgtcaatattattaacgcccggctgacgccgctgaaatatatttttctgaccggccaggcgctgctgtggatggcgacgatcggcgccgtgattggctataagtccgggctcaccggcgtaccgctgattttaaccgggggcatcttcggcggcgtgatggcggtgttaatgccggccctggcgcagccggtggtcaggcgcattaccgggtctgacgatgtggccctggggcacttctgtactatcggctatctggtgcaggctgcggtcgctaaagttgtcggaaaaggctctcgctccacggaagatctcgaactgcctgataactttaagtttctgcaggatacctatctggccatggcggtggtgatggtgccgatgtatctcatcccggctatcgcggcggggcctcagtacatcgcgcagttctccggcggcattaattacctgatgtatgccttcatgcagtccattcagtttgtcgccggggtctttgtcctctatagcggcgtgcgtttattactcaatgagctggtgccggcttttcgcggtatcgcgatgcgtattgtcccggatgcaaagcccgctctcgattgcccggtgctatttccctatgcgccgaatgcggtgattgttggatttctggcaacgactgtcggctcgattatcggcatgctggttttcccgatgttcggcctggcgatgattctccccgggctgttaaccaactttttcgccggcggtacggcaggggtatttggcaatgcgctgggcggacgtcgcggggcgatgatcggcggggtgattcacggcctgtttatcacatttctgccggccattctggtacccatgctggagagctacggctttacgggcgtcaccttcagcgattcagacgtcatcagctccggtctggtattaggccacgccttccagaataactggctctttgtcgccttgtttattgtgtttgtcgccgcactggcatggtttgtaaacggtaaatccgctaagccgaaaggggaaagtgttcatgagtctgtataattttaatgagattttaaaaatcgctcaggaaagagattttaaagcgattggctcgtttaacttgcactgtattgagatgttaccggcttttttcaaagccgcgcaaaacagccgcagcccattaatgatccaaatatcaaccggtaccgcagagtatctggggtatcggttactggtcgatgccgtgcgttcattagcagacagtgaaaatatcccgacctgcctgcatctcgatcactgctccgatattaaagccatcgagacggcaatgaatgcgggcttttcttcggtgatgtacgacgggtctcacttaagcctcgaggaaaatatcggtaacacgcggattgtggtggaaatggcccggccgcggaatattacggtagaaggtgagctgggggcgatcggcgggtcagaggatggaaaagcggtggctgccgaagatatctgttttactaccgtcgaagacgcgacgcgttttgtgaaggagacacaggtcgatatgctggccgtctcggtgggcactgtgcatggcctgtacaccggtaaagcgcagatacagcatgcgcggctgaaggcgataagcgaagcgacgggcgtgccgctggtcctgcatggcggcacaggtgtcagcgatgaggatatgcggctggccgtcaccgaagggattaataaagtgaacgtcggaacggaaatgaacgtgcagtgggtcgatcgctgtaaatcaacgtttgagaaaggaaaagtaaatgacagcgtacggaaatttttaattcccgccaaccaggcagtgactgccgtattaatggaaaaaatggcgctatttaaatagcgtttttaccgacacatatcttttgttgccctgtcttccgccagggagggagcttgctatgtttgaatcattgaaaacgctgtggaaaaaagagcaaaacccgctgcaggattatgatcaacagtcccgtcagctggcggaagagatcgccagactggaaggcgaattacagcgccagcccgataatagcgacgtgcaaaaaacattgatgttgacttacaaccgggcattatcggtatatgccaaaagtaagagccaccggcaggatatcgatgcgctgtttctgcagattgataatttacgcaatattattcgccgcaatatctaggaacagagaatgaccataaaagaactgcttattgaggccgatgccattcaggttggcgttgtggagtccgactggcagcgggtaataaagctggctgcccgcccgctggaggcaaaaggctttatttcgacggaatatagccaggcggtgatcgacaatactttaaatcatggcgcttattacgtttttgatgaagggattgccatcccccatgcccgccccgaatgcggcgtcagacgcaactgctttagcctggtggtgctggaaaagcctattccctttgcggacagtgaaaaagcggacattgttattatgtttggcgcccgggacagcaatgcgcatatcgaggagggcatccgttccatcgtcgcgctgctggataataatgacaccatggccaaactgcggacggcccgcagccgggaggaggttgtcgcattactatgaacagacatctgaccccaggctgcaaaacggccattttaatcaacggcattccggcgtcggggaagagcaccattacccgtttgctggcggagacctttagcctgccggtattgacgatcgacggcatcaaagagccgtttatggcgcgcctggcccctgtcgaccggccgatgaatcgccagctgggctgcgcggcgtatgaggtgatctggtcgattgtcggcgcatcgcctgccagcatggtctggttgatcgacgcctggttcggctttcagccgcgggagaccttgcagagactgctacagcaggcgggcgtggagcaggtgattgaggtctggaatcatatctctccggagctggccgtcgcgcgctatgcctcgcggctggcgacgcggccgccgggccaccccggagaagagtatttgccggagctggcccagctggccgggcgggcgcagcccatgtcgttaggacctgtactgacgatagaccagcggcacccgctgcaaatcgaaccggttattcagtggcttgaaggcacgatcgccggacagcacagcggttttacagattacgcttactcgtcctagggcatacccgccaggcgcagcagcgcggtcaccacggcggcggcgataatcacgccgatcagcgggaccttgcgccaggcgaggaacacagcgaaagcaacgcccagaacgcgcgccataccggcgaaatgtgcgccctcatagaaagtggtggccagggcgacggaaaaaagcagcaccgtcgccgcatcggaaagcagcgcctgcgagcgctcggaaaatgccagccgattgccgagcttcgcgccgccgagacgcatcagataggttcccagcgacaggatggcgataccggcgataaacagcgtcatattgcccattattttttcctcgacagtaaaccgaacagcgaaagcagcactggcagcccggtgggcacaaacggtacggcggcaagcgccagcgcggcgccgctggcggcgcggatcagcgtagtgcggtttttaaaggccgggatcaccagcgccagcaggatcgccgggaagaccgcatcaagcccgatggtttccggcgctggcagcagtttgccgacggccgcgccggttagcgtaccgaggggccagatcagcgcgacgccagcgccgcacagccagtaggccgctttgcgctgcgcgggggtgggctgcgacaagccaaagaccacgctctcgtcgttcataatgtggcatccgataaagcttaaggcgcgccgaccaaccagttcgcgtacggtcaccccgaacgggatatgacgcgcattgactaacaggccggcggcggcggcggccagcggactaccgccgctggcgacaatgccgataaacatgaattcagaagcgcctgccagcacggacaccgaaagcaagagcggcacccataaagggaagccgtaagccaccgccagcgacccataggacatgcccaccaccccgacggcaaggcagaccaaaacaatcgcttttatcgtgtctccgctgagactggagagagtttgtttcatatcacttagccatatcgaacgaatttccattataatgaacacataatgatcgtttttcaaggcgaacgaattgttcgatataaaaaacaaggggcgggtatgacacagccaatcagcgttatcgccaaaagtctggtgcgggagcgggcgcggaccgggctttcgctggcggaagtcgcgcgtcgggcgggtatcgcaaaatccacgctatcgcaactggagtccggcaacggcaacccgagtctggaaacgctgtggtcgctctgcgtagcgctggatattccatttgccaggctgcttgagccgcaggtgaacaaaacgcaggtgatccgccgcggcgaggggaccaaagtggtggcagagcaggcgaactatcaggccattttgctggccgcctgtccgcccggcgcgcgtcgggacatctatttgctgctcacccagcccggcgccgaccgcatttcgcatccgcatccgccaggctcggtggaacatattatcgtcacccaggggcgggcgcgggtagggctgacgtcggcgccggaagagctcggcgagggcgactatatctgctacccggcggatcaggagcatgtttttcaggcgctggagccggatacgcaggccctgctgatcgctgagcaaaactgacatcgcgtcggcgggggacgcgcgctcgctggacgtcatagccatattgcgggaaactagctttcctatgcgaaaacagggatttttatgtcgctgaaagccattgccaaacaacttgggatctccgtcacgaccgtcagccgggcgttgaacggctacgacgatgtgtcgcaggagacccgcgcccgggttgaggctgaagcgcagcgccggggctatcgccccaacactttcgcccgccgtctgaaaatgggcaccatcgatgccgttggtctcgtcttccctgtccgccccgcgccgctcaacaataacgtttttctcgagatggtcggggagatcagccatgagctggcgcgccatgacattgatttgttgctgatcgccgatgatgagcaggcggataaacatggctatatgcgcatggtgcagggccgtcgcgtcgatgcattaatcgtggcccatactctggatgacgatccgcggctggcgcagctgcaggcctccggctttccgtttctggcgctcggccgtagccgcctggcgcagccctacgcctggtttgatttcgataactatgccggcacctgccgcgccacccgccatctgattcaacagggccaccagcgtatcgctctgctgggcgagaacaacaatcaggcgtttattttgcaacggcgtaacggctacctcgatgccctgcgcgaggcggggttatccgatgcatggctgcgtagcgtgccggcgacgcgccgcggcggctatcaggccacgctggagctgctgcgtctgcctgagccacctaccgcgattatcaccgactgcaacacccatggcgatggcgccgcgatggcgctcgcccacctggggcgtttaaccggcgacaatcgcgtcgccctggtggtgtacgacgggctgccgcaggacagcatcattgagaccgatgtcgccgcggtgatccagtccacgcgccagggcgtgggacggcagattgccgatatggtgcgtcgcttaatcgccggggaggatctcgccacgctgcaggtgctatggcagccggaatttatcccgggtgaaaccgcctgatctgacccctttttaacccgtaattctgaagccgatcacggatccgaaacgttttggttggcatccgaaacgtttcggatcaacagtaagacattccttgtgatggagatgtctgatgtctgattcgctgattcacctgcaaagcgccggtgccgatattgtaattaaaacccgccctttcgccgaaattgtctactggggaccgcatttaagccacttttcgccgcaggatgccgacagcctgatgcgcccggtcgccaacggtagactggatgtcgattcgccagtgaccttaatggcggagctgggccatggtctgtttggcgcgccgggcattgaaggccatcgtcaggggctggatgcctctccgctgttcaccaccagcgaagtgcggcacgagggccagacgctgaccctggtcagcgaagatccgcaggccggcctgcgcctgcagagcgagatcgcgttggatgccagcggcgtgctgagcgtgcgccatggcgtgaccaatctgcgcgccagcccatggcaggtggatcgcctggcggtcacgctgccggtcgccgaacgcgctcgcgaggtgatggctttccatggccgctggatccgcgagtttcagcctcaccgcctgacgctggagcacgacagctttgtgctggagaaccgccgcgggcgcacctctcacgaacatttcccggctctgatcaccggcagccgcgcctttagcgagatgcagggtgaagtctggggcgtgcatctggcctggagcggtaaccatcgcctgcgggcggaggtgaaaaccgatggccgtcgctatctgcaggccgaggcgctctatctgccgggcgaaatggcgctggcggaaggggaaaccttgtggacgccgtacctgtatgccagctactcggcgaatgggctgaacggcatgagccagcagttccatcgttatctgcgcgaacggattattcgtttcccgggcaacaaaccgcgcccggtgcatctcaacacctgggaggggatctatttcgaccacgacccggactacatcatgcgtatggccgacgaagcggcggccctgggcgtcgagcgctttattatcgatgacggctggtttaaagggcgcaacgacgactgggcggcgcttggcgactggtatctcgatgagaaaaaatacccctacggcctgacgccggttatcgatcacgtgaagtctctgggtatggaattcggtatctgggtggagccggaaatgattaacccggattccgatctgtaccgggcgcacccggactgggtgctggcgctgccgggctataccccgctgaccggccgccatcagtttgtcctgaacctcaacattcccgaagcgtttgattatctgctggagcggatgagctggctgctgggcgagcatgcggtggactacgtgaagtgggatatgaaccgcgagctggtgcagcctgggcatcagggacgcgccgctgcagacgcgcaaacgcgccagttttaccgcctgctggatacgctggtggcccgtttcccgcacattgaatttgaatcctgctcctccggcggcggacggatcgattatgaagtcctcaaacgcagccatcgcttctgggcgtctgacaacaatgacgcccttgagcgcaacaccatccagcgcggcatgagctacttctttccacccgaggtaatgggcgcgcacattggcaatcgccactgtcatgccaccttccgccagcatagtatcgccttccgcggcctgacggcgctgttcggtcatatgggccttgagctggatccggtgagcgccgatgaagaagagcgcgccggataccgaaaatatgcagccctgcataaacagtggcgcgacgtgatccatcacggcgtgcagtggcgaatagatatgccggacgccaccactcttgcccatggcgtcgtcagcccggataaagcgcaggcgatcttcctcgttagccagctggcgatgccggactacaccctgatggcgccgctgcgcctggcgggcctggaggcgagcgcccgctatcagttgacgctcctcgatcatccgaacattcagatcaccggtgagggcggccacaccatgcggaagctaccggcatggatgacgacgccgcagacggtgagcggtgagtggctgcagcaggcggggctggcgctgcccatcctcgacccggaaagcgccattctgattggtctgcaacgcgtgtgatggtatcgggccgcgctgcggcccttcttgaggaaaatataatgaacccgaccgtctgtacccacaaaaacaaccccaacttctggattttcgggctgttcttctttctctacttcttcatcatggccacctgctttccgtttctgccgatctggctgtcggacgtcattggcctgaataaaaccgaaaccggcctcgttttctccagcctgtcgctgttcgccatctgtttccagccgatcctcggagtgatctctgacaagctggggctgaaaaaacacctgatgtggatcgtgaccgttctgctggtgctgattgctcccttcttcctttatgttttcgctccgctgctgaaaaccaatatctggctcggggcgctgagcggcggcgcctatatcggctttgtattctccgctggcgccggcgcgatggaggcctatatcgaacgggtaagccgcaacagcgggtttgaatacggcaaggcgcgcacctttggctgcctgggatgggcgctgtgcgcgactaccgccggaatgctgttcagcattaatcccgaatgggtgttctggatggggtcggccgccgcgctgctgctggtggtgctggtggccatcgccaaaccgcaggccagtcagtccgcgcaggtgatggattcgctcggcgccaatcgcccggcgatcgatttaaaaacggcggtgcgcatgttccgccagcgtaagatgtggatgtttattctgtatgttatcggcgtggcctgcgtatatgacgttttcgatcagcagttcgccactttcttcaaatcgttcttcgtgaccccggaagcgggcacccgcgcctttggtttcgccaccaccgcgggagaaatatgtaacgccatcattatgttcagctcgccgtggattattaaccgtatcggagcgaagaataccctgctgatcgccgggatggtgatggcggcaagaatgattggctcttccttcgccaccaccgccgcggaagtcgtagcgttgaaaatgctccatgcgctggaggtgccgttcctgctggtgggcgcctttaaatacatcaccggcgtgtttgacgtccggctgtcggcgaccatttatctggtgggcttccagttcgccaagcaggtggcggcgatctttctctccgctttcgccggcaatatgtacgatcggatcggctttcaggatacctatatgatcctcggcggtattgccctgaccgtcaccttaatctccgcgtttacgttagcgggtaagacgaaaaccgagccgctgcgcgataatgcaatgaccgtttaaacgaccggcctcccgtctggagggaggccagttatttttacgccagataaaacacttctttgagctccgcgctcagcgggctgttgtccgggttgctgggcatcacctcgcgcatgtatttccaccaacgctggcatacttccgtgctggcgaccgcttcccagcgggcttccgattcaatctccaccgtcgcgaacaggagatggcgttctttatcgagatagatggcgtagtggtgcgcgccgtgcgctttcagcacagcttccagctctggccagatgtggttatggcggcgctggtactcctcgtgcgcgtcggggttcacctgcatgacgaaggctttacggatcataaggcctccagatagagctcgcgaacctcatcgcggctggcggggcgcgggttacacggcgcgcatgggtcggccagcgctttatccagccagccttcgatatcggcttttctgacgccaagctggctaaaaccctgggggatccctacgcgtttgctcagcgtgcggatggcattgatggcctccatgctggcagcttcatcgctcatgccgcgagtatcgacgcccatcgcctgcgccacgcgggcaaagcgcgccaccgcgttcgggcggttaaagttttcgatgatcggcagcaggatggcgttgcataccccgtgcggcagattatgggtggcgccaggctgatgggccagggcatgtaccagcccgagaccggcgctgttgaacgccatgcccgccagatactggccaaaggccatctgctcgcgggcctgcagatcgtgcccatcgtctaccgctttcggcagccacaggttaatcagacgaatggcctcgagggcgttggcgtcggtcaggggatgggcgccaacggagacaaaggcctcgatggcgtgggtcagggcatccatgccggtggcggcggtaacggctggcggaatgtcgagcatcacgctggcgtcgtcgacggcgatatccgggatcaggttcgggtcgataatcacctctttcacctgccgctcgctatcgataattaccgcgttgctggtcatctccgccgccgtgccggcggtggtgttgatggccaccagcggcacgccagcgtttttcactttgccgacgccggagtaggcggtggaggagcctgggtttgcggtgaggatttttatcgctttggcggtatcaatcgggctaccgccgccgaaggcgatcaggtaatcgcagcgggccgcctggtaagccgcatagccttgctgcaccagcgcttcggtggggttggggaatacctcgtcaaatagctgataagccatctgctgttcatccagcgcggcgaacaggctgtccagcaggcccagcttcaccagctgaccgtcggtgacgatcagcgccttgccccactgtttgcccgctaccagcttgaccatatcaccgatcgcgcctgcgccgtggaggctgattttaggtagtgccaacataaaactcatgataattctccttaatgttgattttgggaaatccgtttcccctaccctgaccctctcccgcagggagggggccagggtgagggggaaattaacatcgtcttcgctgcatcatccgccgggtaataatcggcagggagatcaccacgatcagcatggcgccgataatcaccgacatcacgatgccggggacgttcagcaggctcaggccgaaggtcaccagccccatcagaaaggcggcgatgatcaccccgggcatgctgccggagccgccgagaatattgacgccgccgagcaccgccatggtgacaaccgccagctcccagcccatcgccagggtggggcgggtactgccgagccgtgaggtcagcaggaccgccgccagcccggccatcagcccaaccagcgcgaacagcaccaggttatgacgcttaacgttgatcccagagaaccaggcgccggtcgggttattgccgatggcgtaggtccggcgaccaaagttggttttatgcagcaggaaggtgaaggcggccgcgaggaggataaatagcgcaaactcaaaagagagcgccccccacacgtacccctggccgaaccaggcaaagctctccggatagtgattgagtgcctgatcgcccagcagtatataggtgatgccgcgatacaggctcatggtgccgatggtgatcacaatggacgacaggttaaagcgagtcaccagcaagccgttgaacaggccgcacagcagacctacgcccaggccgatgaacaccagcagcggagtgtccatccccgccgccgcgcagaagcccatcaccgttgagctgagcgccatcgtcgaggctaccgacagatcgatttcccgggcgataatcagcatcgccatcggcaggacgacgatcgccttctcggtaaaggtaaaggtggcgtccgacaggttccagatattgaggaagtacggggaagccacggcgttgccgataaataccgccagggtgaccgccagtaaaaacccttcccagcacagcaggcggcgcagtggcgacggcgcggccggggcgtttttcatctcttcagataccatcattttgctcatgatttcaccgcctgtttctgtcgggctaacgccgcgttgcgcaggattaaccgcccgtgaccgcgattgccgcgctcgttgagcagcaccgccatgacgatcaccgccccggaaatcgccatttgccagaagggcgagatgccgatcaccggcagggcgttattgatgaccccgaggaacagcgcgccgcacaggcagcccagcacccgtccgcttccgcccatggtgctgataccgccgatcacgcaggcggcgaccacctggagttcaaaaccgttggcgacgtcgacataggcgacggcgaagcgcgagatccacagatagccgcagaagccggccagcgcgccggagagacagaagctgacgaactgcatttttccggcgttaatgccggtgtagtatgccgccgtcgcgttgccgcccgcggtgtataaggcccggccggtgcggctgtagcgcaggaaataacccaccagcagcagcgcggcgatggcgcaccagctcagtagcggcagccccaggagggggctgcgcggcagactgagaaaatcagcgctcatctgatgtgagttaacccagccgccgtcagtcagcaggaagataatgccgcgataaatgctcatggtgcccagggtcaccacaatggcgggaatgccgaggcgccagaccagcaggccgttaattactcccatcagcaggcccagcagagtcgccagcgccagcagcgccaccaccggaatacccggatagtgggcgttaagcagggcgacgatcatcccggtcagcgccaggttggcggccatcgacagatcaatgcctttggtgagcaacaccatcatctggccgagggcgaggatgataaggatggcggtatcgttaaacatctccaccagattgcccggtgaaacgaacgacggcgcccggctgccgatggcgccgatcatcaaaataatgaccaccgccagcagcgcttcgcgatgtttcagccatgcgtgtcccatcatgccgcctcctggccgatgccgctggcggcgctaacgatggtttccgctgtcgcttccccggcccggtactcggcgaccatcagcccttcgtgcattacgataatccggtcggccatgcccatcacttccggcagctctgacgacaccataatcaccgccagcccctggctgaccagctcggacataaactgatgcacggcggcctttgagccgatatcgatgccttttgtcggctcatcgagaatgatcacctcgggctgggtcgccagccatttgccaatcaccactttctgctggttgccgccggagagggtctccaccggctgccgccagctgaaggcttttacctgcaggcgcgaggcgtactcgtcggccagccgccattcccgggcgtcgttcaggacgccgttagggttgagcttgctgagctgcggtaaactgatgttctgggcgataggcagggcgatgatcgctccctgtttctgccgctcttccggcacgcagacgatgcccgcgcggatggcgtcggcgggctggtgaaagcgcatggttctgccgttcaggcggatctcgccggaggaggggcgcgagacaccggagagcgcctgcatcagctcggtgcgtccggcgcccaccaggccgtaaaagccgagaatttctcccttgcgcaggcggaagctgatatgggcaaactcggtaggatgacagagatcggtcacctccagcaccgtttctccgggtgtgcagtcgactttcgggtaggtttggctgatcgcccggcccaccatcatcgacaccatccgctcttcggtgatgtcgcttatcgccccggagctgacgtacaccccatcgcgcaggatggtgtaataatcggccagctcgaagatttcatcgaacttatgcgagataaacaggatcgctttgccgtcctgcttcagacgctcaacgatgtgataaaactcgaggatttcatgctgggaaagcgcggcggtcggctcatcgaggatcaccacctgggcgtcgaaagccagcgcccgggcaatcgccaccatgtgacgctgggcgatgctgagggttttcagcgtggctcgcgggtcgatctggacttccagccgggtgaggatctcgttggctctgcggtgcatcgccggccagtcgagcgttttcagcagtcccttatacagatactggccgacgaaaatgttttcgctgaccgagagttcgtcaaacagcacggtttcctggtgaatggcggtgatccctaccttatgcgccgactccggcgttggcagatgaatggggatcgctttatagaggatctcgccctcttcgggctgataaataccggtcatcactttgaccagcgtggatttccccgcgccgttttcgccgattaaggcggtcactttgccgggccagagatcaagctgcacgttctcaagggcgcgcacaccgggaaaaatcttggtgatccccttcagcgacagcagtggcgttgatgctgacatgatagttctccacaaaaatcacccctcaccctaaccctcccccacaggggcgagggaacggtccggcgtccgctggccgcatcgcgcagagggccagccgttccccctctccctccgggagagggccggggtgagggaacaaggattagaaaattttcgagaacttatcgatgttgctcgcatcgtagacaaacggcttggccatcgcgccattcccctcggcgtccagattcactttgcccagcttgcccatactggcttcggttttggtcgccgtgcctttgactaaatcgtcggccagataggtggcggcgtagcccaggtcaatcgggttccagatggcgaagcttttgctggcgccggacttgatcgcgccggccatttccgacggcagccccagcccggtgacatacactttgccgattttgccctggtccttcaccgcctgcgcggcggcaacaatccccaccgacgacggcgagacaatgactttcaggtccggatatgatttcagcagacccaccgcttcgcggtagcttttatccgacagatcgtcaccgtaggcgacggtgaccagctgcaccgacggatactgcggtagcacctttttcatctcctcaatccagatgttctggttcgtggaggttggggtggcgcttaacacggccacctcgcctttctcaacgttcagcgcctgcagcgcatcggcggcaagcttgacgttggtttcgccaattaaggcgttatttgaggggttaagatggatctgacggcctgccggcgccacgccggagtcccatgagaccaccttgatgccgcgctgcatcgcttttttcagcaccggcaccaccgcgtccggatcgttggcggaaatggcgatcgcatccaccccctgggcgatcaacccgttcagcacgtcgatctgcgcctcggcggtggtagtggtcgggccggtgtagatcactttgacatcacctaactccttggctgcctgttgggcgccaacgttggcggcttcgaagaagccatttcccagcgatttcgccacaagggcgattttaacttcggctaaggcggaaccggacaacgccagggcggcaacggtgaggatcaagcttgtctttgttttcattgcttttactccacatgagttagttttgtagggtttgcaggtgatatttcgccccgtctcggtgagcggggcgcgatgttgttatggataaagatctaaagcggactgcagcggctgcacgttgaagcgtttgccaagggcgataagctcgtcgcgggtgatggtctgcttcatcccgcccatcgacaagactttcaccagcacttcggcggacttctcggcggtatcgatcaggccgaaggtctcatccagcgtggggccgctgccgaagacgccgtggaacggccacagcaccagcgagtgtttttgcatggtttcggcggtcgcctggccgatttcatcggtgcccggcaccatccacggcagaatgccgacgccatccgggaagaccaccagacattcggtgctaccttcccacagcttacgggtgaaaagatcgctgtggttctccagaacataggtcagggcgatcaggttggtggcatggcagtgcatgatcacccggtctttgccgccggtcagtttgatgcgctcgctgtgcgacaggaagtgtgccggcagctcggaggtcgggacggcatcctccgtcaggccccacaggatatggtatcccgcgccgtcgctgtcgaccttcaccacgccgaggttagcggccgggtcgagctggacgttacggaagaatttgccggagccggtgacgataaacggctggttggccagggttggcatcggctggctgagggcgatatagcgcggtttggcgtggaaatccgccgcgtaaggttcgatatccgcttcatccagacgcagcgtcaggttgccgccgttgcgttcgtcccagcctttcagccaggcgtcggaggtggctttgatcatgccctggacgaaccaggcgtcgataatggtctgcatagtcttgtctttcctgttgattcggtgcggggttgaccccctcaccctaaatatgtgcgtgcccccggattgcgccgtaaacggcttatccgggctaccggttcgtagcccgggtaaggcgtcagccgcgacccggggaagctcgtgcattacccgcgctggctcagaaccgcattctcataagcccgtacgctgtccagccactggctacccgccggcgtgtcgtgacgctgacagtacatctcccagatggcctgccaaggcagcgatttttgctcttcgagcagcgccaggcgggcggtgtaatcgccgtcgttctccagctggcgcagctgggcggtcggttccagcagggcgcgcagcagcgcttttttcatattgcgggtgccaatcacccaggccgcgatgcggttgatggaggcatcgaagaagtcgaggccgatgtgcacgcggtcaaacaggttatggcgaatgatttcgctggcgatggcctgggtttcatcatccagcagcaccacgtggtcgctgtcccagcgcaccggacggctgacgtgcagcagcaggcgcgggatgtagagcatggcggcggagatcttgtcggagatcacttccgtcggatggaagtggccggcatcgaggcacagcgccgtctgacggctggtggcgtaacccatatagaactcgttggagccgacggtgtagctttcggcgccgatgccgaacagcttgctctccacggcgtcgatatggtgcgccgggtcgagcttctcgctgatcacctcatccagggcgttcagcagccgctggcgcggggcgaagcggtcaacggtaatatccttcatgccgtccggcacccagatattcatcaccgacggcgtgcccagctgttcgccaaaataagcggatacgcggcggctggctttgcagtggtcgatccagaactggcggatctcatcgttggcgtgcgacagggtaaagccgtcggcgctcagcggatgcgagaagcaggaggggttgaaatccagccccagtttgttggctttcgcccacgtaacccagtttttaaagtgctccggcttaatctcattgcgcgctaccggcgcgtcggattccaggtaaatagcatgcagattgagacgctttggccccgggatcaggctcagcgcctgctcaaggtcggcgcggagttcttctgcattgcgcgctttgcccgggtagttgccggtcgcctggatgccaccggtcaggcttcccgccgggttttcgaaaccggcgacgtcgtcaccctgccagcagtgcatggagacgggcagacggtccagctggcgcagggcctcctcgacatccacgccgacggcggcgtagcgctgcttagcaatttcccaggcttgttcaagttgagtggtcatgcgcaaagctccttggtctgttgtggctgaaactgcgccacgaaacgggcaatttcactatcaggattgggggtaaaagtggtgagcgccgcgttgccgcgcactacctgacgaaactcatcgacattggccagctcgtcgagggtcattaactggatgccgatattgccgagggtggaggcctctatcgggccggccacgacgacgatcccgcaggcgtcagcgcacagctggttgagcagcgtgttctgacagccgccgccgacgatatgcagctggctgaaagggtggccgcgcagcgccgccagctcgttaagcacccgggcgtagagcagcgccaggctgtcgaaaatgcagcgcgccagttcggcatcgctttcaggaaccggctgcccggcgtcgcgacaggcggcctggatctcggcgctcatactggccgggttgataaagcggtcatcgttgcagtcaattatgaagcggcacgccggtagcgcggcggtgcgggcgatcagcccctgcaggtcgctgacgttttgctcttttagcacccgctgcagcagccacaggcccatgatatttttcagcacccgatagcggccttcggctccgccttcgttggtgatattggcctgcagcgccgcgtcgcaggtgtacggcgtcaggctttcaaaccccatcagcgaccaggtgccggaggagagataggcggcatggcggtcggccagcggggaggcgatcaccgcgctggcggtgtcgtggctggcgacagcgactaccggaattcggttaccctgcgggcagatccagtggcctatcacattgccggggtgggtcggctttccgaaccacgccaacggcgcgccggtccagttcagcaacgtctcatcccagctatcgctgttaatgttgaccagctgggtggtggtggcgttggtatattcccagttcagattgccggtcaggcggaagctgaaatagtcggggatcagcagggcatgggcagcctgactgaccagctccggctgctgctccaccagcgcgcgcagctgataaagcgtgttaaacggcaaaaactgaatgccgctgcggcgatagatttccgcccggcccagctgcgcttcagcgtgacgcagcaggccctgggtgcggtcgtcacggtaggaaatcggcagcccgacgcgctgaccctgcttatccagcaggacataatctaccccccaggtatcgatgccgatactgtctatcagaatgccctgctcacacactttctccagcccgcggcggatctcgccttccaggctatctacatcccagcagtcgaagccgtctactttctgcagactattggtgaagcgatgaatttcgcgcagcgtcagggcgcgcggcccgggctgatagctggcgagcatcacccgcccgctggaggcgcctaaatcgacagcgacacaatgacgaatactcatgaaacgatccttcttaaaatcattgtccgcagtctaaaaaaggccgtttactgacaccttctcgttacggacagccaaaactggccgctggcaagaaagcaaaggtgaccgtgagggacatcacagtttgcggttttaggggatggcgagggggatgtgatggcctccgcagttccgcatctttccggctgattcttgaaaaagcggcaggatttacgaatttcgcggtcaaaaattgaaggccggatagccaacccttcattactatcagccggtgactgataatttttctcattacgagggtggcatcatgaccatattgcacagtacggatttctttaaggccgggatctcgacggtggctattgaaccccgcctccctcagtcggcctttccggaacatcaccatgatttccatgaaatagttatcgtggagcagggatcgggtattcacgtcttcaatggccagccctataccattggcggcggttcggtctgttttatccgcgatcacgaccgccatctttacgagcacacggataatctgtgtctgaccaatgtgctctatcgcgcgccggatgcgtttcgctttctcgccggggtcagtcaactactgccccaggaacaggaaggaaactacccctcgcactggcgggtgaatcaaaccgtcctgcaacaggtgcggcatatcgtggcgcagatcgaggccgtggggagcgatacggatactcatgccgtcgccagccgtgagatcctgtttatgcagctgctggtgttgttacgtaaaagcagccttgcggaagaggccaccaacaacgatgcgcggctgaatcagctgttggcctggctcgaagaccattttgcgcaggagatctgctgggaggaggtggcggcgcagttttcgctgtcgctgcgtacgctgcaccgccagctgaagcagcagaccggtctgacgccacagcgctatcttaatcgggtgcgcctgatgaaagcccgccacctgctgcgccacagcgatgaaagcgtgactgatatcgcttatcgctgcggcttcggcgacagtaaccacttttcgacgctttttcgccgggagttcgactggtcgccgcgcgatatccgccaggggcgcgacgccattcttcagtaacgcgagaagagtcaacgtattgcagactaaaaacgcgaataatgcgccgttatccgcgtttggagtgtgagccgtggccggtctgattttacgtaaagaggagtttttcccttccgccacacaggcagtggcggtggcagaccgctacccgcaaaatgtctttgccgaacatacccatgagttctgcgagctggtgctggtgtggcgaggcaacgggctgcacgtccttaacgatcgcccctggcgcattacccgcggcgatctgttctacattcgcgccgaagataaacactcctatgcttccgttaacgatctggttctgcagaacatcatctattgcccggagcggctgcagctcaattttgactgggccggggcgatccctggcctcttcggcacgccgtggaagccccactggcgcatgggcagcacaggtatggcgcaggcgcgccaggtgattagccagcttgagcatgagtgcgcccggcgcgacgcgcagggaaatgcgatggccgaactgctttttgcccagctggcgctgacgttgcagcgccatcgctatgcgacggatgatcccgcggcgacgcagcgcgaagcgctgctggacaaactgctggccgcgctggcggccagccttagccgcccctttgttctggagcgtttctgcgagcaggagggcggcagcgagcgggcgcttcgccagcagtttcgccagcaaaccgggatgaccatcaatcactatttacgccagctgcggatctgccatgcgcagtatttgctgcagcataccgagcgcttaatcggcgatatcgccatgcagtgcggctttgaggacagtaactacttttcggtggtttttagccgggaaatcggcatgtcgccggggcaatggcggcagcgcagtcgcgccgccgcctgaagagcgtcgttgtcaggcagatgatccggtgattaactggccattcccagaccgacgatattggcggcgatgataatcaccacgcagccgaggctcaggacgctcaccggacggcggccggcgttgttccactccttcagcaccagacccaccacaccgccgcacagcacgtagaaactcatgtgcagcatccagctcatataatcatactgcgccggaatgctggcgtggccccaggcatagaagaagaactggagataccacatcagaccgccgagggcggagagcagaaggttgctgatgataagcggtttggccagcgagaaatcggctttgactgacaggttcttcactttcgccagacgaataaagcagaagccaaggttaaccagcgccccgccgcccataatcaccacgtagcttggcagcgctgcgtacagcgggtcgacgccgagcgccgcggcggcatcatgcatcggtttggcggcgttcatcgcgaacgacatccctgcggagaagataccgcacattaccgccagcagaagccctttcttcagattgaactcttcggctttgatgcccattttgcgctctttcagctggcctgcgcgggtgacgatgccgacgccaatcaccgccaccagcacgccgagcagcgtcatttgaccgccctgggtgtgcatcagcactgcaaactgaccgttaataatcggcgtcatcagcgtgccgacaatcagcgtgatgccaatggcgatgccaatccccatcgacatgccaagatagcgcatggtcaggccatagttgatattaccaatgccccacatggcgccgaacagaaagaccggcagcagcgtggaggcgctaaaagagcggtagtaggcccagaagtcgggtaacagcgtggcgctgatggcccagggcagaatcagccaggagacgatccccccgaccgaccacatggtttcccacgaccagtgttttacttttttgaacggggcatagaaacaggcggcactggcggcccctatcaaatgccaaaaaatacccatcgtaatcgcgtggttcattgattttatcctcatctttttttatcggagacggcggcttccgatgggatgagtgtaaaaattggccgctttggccgccttcaggacgttgccacaggatggcgaaccctggcaaccatgggcttaattagttgttctacatcacaaaacgacgggtatttcttctggttatatccatatgaaaaatacggcattgataagcattttcaataccatttaattaactataatggacaaactgcttacgcggcgttaacacttgagccgctcgacaataatggagatgattatgagctataccctgccatccctgccttacgcttacgatgctctggaaccgcacttcgacaagcagacgatggagatccatcacactaaacaccaccagacctacgtgaacaatgccaacgccgcgctggaaagcctgccggagttcgctaacctgtccgctgaagagctgattaccaagctggatcagctgccggctgacaaaaaaaccgtactgcgtaacaacgccggcggccacgcgaaccacagcctgttctggaaaggcctgaaaaccggtaccaccctgcagggcgacctgaaagcggctatcgagcgcgatttcggttccgtggagaacttcaaagcggaattcgaaaaagccgctgctacccgtttcggctccggctgggcgtggctggtcctgaaaggtgacaaactggccgttgtctccaccgccaaccaggattccccgctgatgggcgaagccatttccggcgcttccggcttcccgattatcggcctggacgtctgggaacacgcttactacctgaaattccagaaccgccgcccggactacatcaaagccttctgggacgtagtgaactgggacgaagctgcagcgcgttttgccgccaaaaaataaggttgcattgcgctaaaagagaagcgagtctgatgactcgctttttttatatctgtagcaaggagagcagccatgcattatccggtgaatgtctttgtcggcaaaatcagggactacgcgggcagtcgccccagcgcgatcggcaaaatccaggtcgacggagaattgcagctcggcgatctcggtctcaatggggaccagcaggcggagaagaaaatccacggcgggccggaccgcgcgctgtgtcattatccgcgcgaacactatgccgactggatccgtgacttcccccagcaggccgagcggttctgcgcgccggcgttcggcgaaaacctctccaccaccgggcttaccgagcaaaacgtttatatcggcgatatctttcgctggggcgaggcgctgatccaggtcacccagccgcgatcgccgtgcttcaagctcaactttcattttgcgatcaatgatatggcgcagctgatgcaaaacagcggaaaaaccggctggctgtaccgggtgattgccggagggcaagtttccagcgatgcgccgctcgagctggtttcccggctgagtgatgtcagcgttcatgaggccggggcgattgcctggcagatgccgtttgatgatgatcagtaccaccgcttactgtcggcagcgggcctgtctgttagctggagccgaacgatgcagaaacggcgtttaagcggcaagatagaggatagttcgcggagattatgggggaaataatcccccatattaagtattcccggggatgctcccggcgcagcgccgcacagcgcaggccgggtcggcgtcaggttcgtttatacagcggcagccagattgttaaacgcagaccacccagcgggctgtcgtcggccttcacccagccgcggtgctgctgaatagcggtttcgacaatcgccagccccaggccggtgccgccggactcgcggtcgcgcgcctcgtcggtccggtagaatggccggaaaatctgttcgcgatcctccgggctgactcccgggccgtcgtcatcgacgttaaccgtaatcccgtctttatccaccgagaagctgacggaaattttcgtatgcgagtagcgcagggcgttgcgcacgatattctccagcgcgctttccagcgcattggggttaccgtacagcggccatgggcccggcggatactcaacggtgaaagatttccccatctgctcggcttcaaacgccgcattgtccaacacttcgttccatagctgattggctttcaccgtctcgctgaccagggcgtttttcgcctgattgcgcgacatcaccagcaggtcgttgatcatgctgtccagccggtgcgcttcagtttcgatacgctccagctccttactctctccgctgcggcgacgcagcagggcggtacctaattgcaggcgcgtaagcggcgtgcgcagctcgtgcgagatatcggacagcagccgctgctggctggtcatcatccgctccagggccgtcaccatctggttaaaactggcgccagcggctaaaaactcctgcggcccggcttccagctccggatgctggcgcaggttgccctgggcgacttcatcggcggcatttttcagcttacgcgccggtttcgccaggctccacgccagccacagcagcagcggggcgctgaccagcatcgtgacgatcagcagcagcagcggccggtcaaacagcaggttgataaagtcggattgtgaggtgctggcgggacgaatcagatagagctgatagttatcctccccgtcccggacggaaaacgggcccaccatttccaggcggccatagcgttttttctgcggatgatcggcgttatcggcctggccgataaagttacgaatgatctgcatctcgttgcgttctgcgccgatcacgcggccttcgctggtcaccagcagcaggcgttgtcccggaggcgcccatttatcgatggcgcgaaacaaacgacgccaccacatcaggtcgtttggcggatcgttggccagctcggcctcgacgtgctgctcgatcatgatgccctgacgctgctcgctttccagcagctcggtcatctgccgggaatccagtttgggcaacatcagcaccagcatcaacaccagcgccagcgtgagccagaagatggcgaagatgcgtgcagtcaaacttccaatcatgaagcggaaaccatcagatacccgcggccacgcagcgttttaaaccacggatggccatctttgcgctccggcagcttacgccgcaggttggaaatatgcatatcgatggcgcggtcgaacggcgtcaggcgcttgcctaacacttcctggcttaaatgctcacgggagactacctgaccgagatgctgcgctaacaaatagagcagggtgaactcggtgccggtgagctccagcgtctggccatcgaaattggcttcctggcggcccggattgaggcttaaggcatccacttccagggttggtgagccggcttcggtcgtctgctgctgctcgctccagtgggaacggcgcagaatcgcgcgtatacgggccaccagctcgcgatcgttgaatggcttaggcaaatagtcatccgcgcccagctcgaggccgagaacgcgatccagctcgcttccgcgcgctgttagcatgataaccggagtctggtgtgtctgacgcagctctttcagcgtatcgataccgtttttcttcggcatcatcacgtcgagcagcaataaatcaacgctgtcgtccagaagggccagcgcctgttccccatcatgggccaccagcacgttaaaaccttccatatcgagcagctcttttaacagggaggtgagctcccggtcatcatcaactaacaggattttattcattgtttaaatacctccgaggcagaaattacgtcatcaaggcccgctaatccatgactttacgttgttttacaccccctgacgcatgtttgcagcctgaatcgtagactgtctctcgttgaatcgcgacacaaacgttttgggagtatgtgatgcgcaatgttatcgctgccgtcatggcctcaacgctggcgctaagtgcatatagccaggccgctgaagtcgttaccagcgttaactggctccccggagacgaagggggacagcgcggtagccaaagccatatgtttgacggcataagtttaaccgagcagcaacgtcagcagttacgggatcttatgcaacgggcacgccacgacaggctccccgttaatgttagcgaaatggagacaatgcatcgccttgtcaccgcagaaaattttgatgaaaacgctgtgcgcgctcaggcagaaaagatggcgcaggaacaggttgcccgccaggtcgagatggctaaggttcgcaaccaaatgtaccacctgcttacgccagagcagcaagcggttttaaatgctaagcaccagcagcgtatggatcagttgcgtgaggttgcaaggatgcagaaaggctcagcgatgatgctttcgagtagtagcaacaccctgcaaccccagtaacaaaccctgttttccttgccatagacaccatccctgtcttcccccacatgatgtgggggttttttttgccctttttacggtaaatcaactccttcgcctatcccgtgagcgtcacaagttcgggttatactaagcgcattgcaggagaaggagcctatatgaatcaatcttatggccggttggtgagccgcgccgctatcgccgcgacggctatggcctccgcgttacttttgatcaaaatttttgcgtggtggtataccggttctgtcagtattctggctgcgctggtggattcgctggtggacattgccgcctcgctgaccaacctgctggtggttcgctattcgctacagcctgctgatgaagaacatacctttggtcatggcaaagcggagtcgctggcggcgctggcgcaaagcatgtttatctccggctcggcgctgttcctgtttctcaccggcattcagcacctggtgcgtccggagccgctgcaggccgccggcgtcggggtcgtcgtcacattgatcgccctcgttagtacgctggcgctggtgactttccagcgctgggtggtgcgaaaaacccagagccaggcggtgcgggcggatatgcttcattatcagtctgatgttatgatgaacggcgccattctggtggcgctgggcctctcctggtacggctggcatcgcgccgacgcgttgtttgccctggggattggcatctatattttatatagcgcgctgcggatgggctatgaggcggttcagtcactactcgaccgcgccttgcctgacgaggagcgtcaggacattatcaccatcgtgaccgcatggcccggcatccgcggggcgcacgatctacgaacgcggcagtcagggccgacccgctttattcagattcatttggaaatggaagataacctcccgctggtgcaagcccacgtgattgcagaccaggtggagcaggcgattctgcgccgtttcccggggtccgatgtcattatccatcaggatcccagctctgtggtgccagcggcgcagcagggcttttttgagcgttaggttatagtctgtaaactcgatgtaaaaatgtggggcagatcggcattttttgtataaattaccgccgtttggtctgacctgaatcaattcagcttgaggcgtttgatatactattgtcattagcgtcgtgcactcctggtgagggagcgcttcaggcaacagaattattttttgcttcctaagttcagaggtagtcatgattaagaaaatcggtgtgttgacaagtggcggtgatgcgccgggcatgaacgcagcaattcgtggcgttgtgcgcgcggcattaacggaaggtctggaagtttttggaatctatgacggttacctcggattgtatgaagaccgtatggttcagctcgaccgttacagcgtttccgacatgatcaaccgcggcggtaccttcctgggctccgctcgcttcccggaattccgcgaagaacacatccgcgctgtggctatcgaaaacatgaagaagcgcggcctggacgcgctggtggttatcggcggtgacggttcctatatgggggcgatgcgcctgaccgagatgggcttcccatgcatcggcctgccgggcactatcgacaacgatatcaaaggcactgactacaccatcggcttctttactgccctgagcaccgtggtggaagcgattgaccgtttgcgcgacacctcctcttcgcaccagcgtatctccgtggtggaagtgatgggccgttactgtggcgacctgaccctggcggcggcgattgccggcggctgtgagttcatcatggtgcctgaagtggaatatacccgtgacgatctggtggcagaaatcaaagccggtatcgcgaaagggaaaaaacacgctatcgtggccatcaccgagcacatgtgcgacgttgacgagctggcaagctatatcgagaaagagactggccgtgaaactcgcgccaccgtcctcggccacattcagcgcggcggttccccggttccttacgaccgcatcctggcttcccgcatgggcgcctatgcgattgagctgctgctgcagggccatggcggccgttgcgtcggcatccagaacgagaagctggtgcaccacgacatcatcgatgccatcgagaacatgaagcgtccgttcaagaacgactggctggattgcgcgaagaaactgtactaagttacgcgccggataaacaaaaggccttctcatggagaaggccttttttatggcggaaggtttattcgatatccagcgggtcttccgacaggatcatcccggtgttatcggcatacagatggtcgccggagaagaaagtcaccccgccgaaattgacgcgcacgtcgctttcgccgatgccttcgccagccgcgccgaccggaatagccgccagcgcctgaataccaatgtccagctcctcaaggtcgtcaacctggcgcaccgcgccatagaccaccaacccttcccattcattctggacggccagacgcgccaggtcagcgtcaattaacgcgcgtcgtactgagccgccgccatcgatcaggagaatatgaccacggccattctgctcgagcagatcgtagagcaacccgttatcctcgaaacatttaaccgtaatgatctgtccaccaaacgacgaccgtcctccaaagttagagaacagcggttccacgacgttgacatcttcctggtagatgtcacaaagctcggaagtatcgtatttcataggcttaacgttcagttgctgcgagagtttttagtatatcccgcgaatcgcattgttggcaaaatcatcaattgttaattgatatttgtcagttaagccatcagcttactggcaataattccgataacaaacagcaggttggtcagtaaggcccctttgaccgtcttttcgagcattggccgcatcgccagcggatcggattcgcgcaggacgtagcgcgcctgtttcaccagcagcggcgtggcgagaataaacagccagccccaggctgaatgcagcgccagcaggttaaacagcgccagacacagcagggcgccgagcagcaggcaggcatgatagcggcgggcattgaccgggcccaggcgcacggcgagggtgttcttcccgttctgccggtcgctgtcgatatcgcgcagattattgatgttcagcacggcggtcgccagcagaccgcaggctgtcgccggcagaaaaatggccgcttccacattatgggcttgcagataccagctgccgaggacgctcagccagccgaagaaaacgagtactgagatatcacccagaccaatatatccatacggacgggtgcccaccgtgtaggtgatggcggccacgatagacaggcctcccagggcgaggaagccgatgaaatcgccgacgctctgccaggcggcgcacagcagcgccaaaccaaacaggcagatgagtacgacggtgacgatcagggcgcgcttcatctgctggggggtaatcacccctttctgcatcccgcgcagcggcccgatgcgatccggtttatcgctccccttaaccgcgtcgccgtagtcattggcgaggttggaaagaatttgcagcaagccggcggtgatcagcgccagcagggcaacccagggatcaaaatggccctgctcccaggcaaggacggtgccaacaataatcgcggcaaatgccagcggtaacgttttaggacgcaggctttccagccacgcctgtgaacggctgatatcagtcatagttattctagccaataaaaatgggggcgatagcccccatcaacagtgatgaaaatgcattgcaccggattataggataaaacggctcagatcttcatctgccaccagaacatccaggtgtttactcacatattcggcatcgatagtgacggtctggccgttcatctcgctggcatcataggagatatcttccaccaggcgctccagcacggtgtgcaggcgacgcgcaccgatgttctcggtggtttcgtttacctgccatgcggcctgggcgatgcgcttgatgccgtcttcagtgaattcgatgttcaccccttcggtcgccatcagcgccttgtactgcacggtgatggaggcattcggctcggtcagaatacgttcgaaatcatgggtagtcagcgctttcagctcaacgcggatcggcagacggccctgcagttccgggatcaaatctgatgggctggcgacctggaacgcgccggaggcgataaacagaatgtgatcggttttcaccatcccgtgtttagtggagacggtgcagccttccaccagcggcagcaggtcgcgctgaacgccttcacgagacacatccgggccggaggcgttgccgccgcgcttacagattttgtcgatttcgtcgatgaacacgataccgtgctgttcaacggcgtcgatagcttcttgcttcagctcttccgggttaaccagcttcgccgcttcttcttcgataagcagcttcatcgcgtctttgattttcagcttacgcggtttctgtttctggccgcccaggttctggaacatggactgcagctggctggtcatctcttccatgcccggaggggacatgatttcaacgcccatcggcgccgcggcgagatcgatttcgatctctttgtcgtcaagctggccttcgcgcagtttcttgcggaatgcctggcgcgcagcggaaggttcctgcggctgttcagcctggccccagttgtttttcgccggcgggatcagcacgtcgaggatacgctcttcggccatttcttcggcgcgatagcggtttttatcgatggactgcatgcgtaccattttgatcgcagcgtcggtcagatcgcggatgatagagtccacttctttaccaacatagcccacttcggtgaacttggtcgcttcaactttgatgaacggcgcgttggccagtttcgccaggcgacgggcgatttcggttttacctacgccggtcgggcctatcatcagaatgtttttcggcgtgacttcatgacgcagctcttcattaagctgcatacggcgccagcggtttcgcagggcgatagaaacagaacgcttggcggcgtcctgaccgataatgtgtttgtccagttcgctgacaatttcgcgtggggtcatttcagacatgggagatccttacgctttagaaggtaattcttcgatggtgtggaaatggttggtatagatgcagatatcacctgcaatatccaacgctttctcggcgatgtcgcgcgcgcccatatcggtattttccaacagcgcgcgggccgcggcctgggcgtaaggaccgccggagccgatagcaatcaaatcgttttccggctgtaccacgtcaccgttaccggtgatgataagcgacgcgttttcgtccgcgacggccagcagcgcttccagtttgcgcaacatccggtcagttcgccagtctttggccagctcaacggcggccttcaccagatggccctggtgcatttccagtttacgttcaaacagttcgaacagcgtgaaggcgtcggcggtgccgccagcgaaaccggcaatcactttgtcgttgtacagacgacgcactttcttcacattgcccttcatcacggtgttgcccagcgtggcctggccatcaccggcaataacaacatggccgttacggcgaacacttacaattgtagtcacgagcagaccccttggttgcaaaagcggaacaggggccccgcgctgtccgcggggccgaatgcaattatagatgggggggattttgagggtttcaacccctggcggcgagacgaatgcagttcgcgtgtccagccatcttcaggcgggtgatcatctcgttggcgctttctttgcctttcaacgggccaataaccacgcggttccagccgttgttagtggtaatgtgcgaagcaaacccttcgaaagccagctgagcgcggacggtttcggcctgctcggcgcctttaaaggagccgcactggatcatccagctacgatcgtctttcttctcggcggtggttttcggcgcttcttccacccgagttaccggcgccgcggcctgggtacgcggctgcgtggtattggtatgcgctggcgtctgcagcagatcctggtacggctgctggtttgacgcggtctgcttcggctgttgctgctgaaccggcttcggctgctgaacgcgcggcggctgttgttggacggtctgcgcctgagtctgcgcccactgttgctgctgcgcctgctgctgttgctgcgctaaacgctgacgctgaagcgtctgctggcgctgcgccggcgtttgttcgttccacggcacttcggtcagctgggtcggctgctggcgcatatcggcctgcatctgggcgagcagctggcgctgctcgtcggtcagctgttccggtttcatgacttcgccaccggcggtcggttcggtcggcgcgcggacgccaggctggcggctttccagctctttaatatagcgccagcgctcttccggtttgggcggcaagccgttgccggcggcctggcgattttgcatcgcttccgcttcttctttcttatgatgcgtaatgaaatagaggccaccgataaaggccaccagcacagccgccgcgatcgccaccatcgccggtgaaatcgccggaaggctgctttgcttattccttgagcttcgggtcgtgctctttttgcgccgcgaagaagccggttggctgcggcgtacataatctcgttgtgccactatcgtttcgctgtcttatattcgttcgtcagcccgccatgttacttaagcggcgggcctttgaccagaagagcaggcccgaaagcctgatggttatcgtctgattttttgcgtactgccgcgaacaatcagttcgcaatcgagcagacgcgagccgctgttcacgttatgcccctgcatttgctccagtaatagcagcattccttcacggccgatatcaaaccgtggctgtgaaaccgtggtcaacggcggatcgcaaaattcagacaacgcgatgttatcgaagccgacaattgacaggtcgtccggcactttcagaccgcgacgttttgccagcgacaaagcgcccagcgccatcacatcgctatggcagaagacggcggtcggcggcaccggctgcgccaggagctgctccagcgcattggcgccggcttcgaaggtaaagttgccgcgagcaatatagtgcggatcgacggtgataccgctgcggcgcagcgcctgcacataaccctgcaggcgataatggcacaacggcatatcttccgggccggcgatacagccgatacgctgatgtcccagctcgtggagataatttaccgcgttaaaggccgccgtcaggttatcgatatggacggtgggcagctccagctccggcgcaaactcattcgacatgaccattggcggcaaattgcgctgctcttccacgctggcgtcaaacggcaagcgcgagctgagcagcaccataccgtcgatctgcttggtgataataaggtcgataaaggttttttctttctggttctggtgggcgcaatcgccgattaacaccagataaccgtgctcggcggccgtgacttcaattccgcggatgacttcactaaaaaagggatcgcagatatccggcacgatcacgaggatcgtccgcgattcgttgcgcttcatatttcgcccgagcgactgcggtaaatagccgacttccagcgccgcctgctcgacccggttacgggtggcttgcgacaccttatcagggttcatcaacgctcgggacacggttgccgtggaaacgtttgccttgagggcgacgtctttcatggtggcggcaaccacttgttttttgggcttcacctggtttctcctcgctgaatggcgctggcatttcccttgggcgctaactgctgcatcatttttatcagatagtcgcggcagtgagttacagaattttcatgaaaaacgtgatgcttgttaaatttttcgatccggctcgcaagagaaggcttatccttcaatcggatcgacatccagcacccacttcacttttctcgcctccggaagcgtattgatcagcgccagcgtaccgctaacgatatgttgcagacgcacccgcgaaggatgctgcagcaatatttgccagcgccagcggccgccgcgctttggcgccagcgccggaaccggaccgagcacccatagcttttcgtcggccagcgggctggcctgcagcagattgcgcagctgctgtaaaaacagcggcgcctgctggttgttatggtcttccgcacgaatcagcacatggctggtccacggcggcagctgcatcgtctgccgctctgccagcgcctgttcggcaaaggcgtcgtagcctttatacagcagggtctgcagtagagggtgttccggatggtgggtttgaagaatgacctcgccctgttttcctgcccggcccgctcgtccggagacctgggtataaagctgagcgaaacgctctgcggagcggaaatcagcggaaaacagcgccccgtcgacatccagcagggagacgagggtgacgtccgggaagtggtgccctttggctagcatttgggtgccaatcagaatacgcgccccgccgcgatggacggcggcgagatgctcctccagcgctcctttgcggctggtggtatcgcggtcgatacgcgagataggcacctcagggaacagcggcgccagggcctgctccagctgctcggtgccgatccctaccggcaccagatgcgtggagccgcaggaaggacactggcgcgggatcgggcgctggctgtcgcaatggtggcagcgcagatggtgctgcgcctggtgcaacgtatagtaactgtcgcagcgcgggcattccgctatccagccgcaatcgtggcacagcagcgctggcgcaaagccgcggcggttaagaaacaggatcacctggttatccgcttgcaggtgctggcgcatacggctaatcagcgcgggagacaggcccgcctgcagcggttgccctttgagatcgagcacgtgctgctgggccgggcgcgcattgcccgcgcgtttgcttaaggttaactggcggtatttaccctggcggacgttatgcagagtctccagcgccggcgtcgccgagccgagaattatcgggatctgctcgctgtgggcgcgccataccgccaggtcgcgggcatggtagcgccagccttcctgctgcttgtaggagctgtcatgctcttcgtcgatgacgatgacgccgagatctttaaatggggtaaacagcgaggagcgggtgccgatcacaatggccgcttcgccatttttcgccttcagccaggccgagagacgttcgctgtcattgagcccggagtgcagcacttccaccggcgcgttaaagcgctggcgaaatcgggcgatggtttgcggcgtcaggccgatctccggcaccatcaccagcgcctggcgcccctgcgccagcacattctccagcacgctcaaatagacttccgttttcccggagccggtaatacccgccagcagccaggcggagaaacgatcggcggcgctgtggatcgccccgacggcggtggcctgctcggtattcaggcgcaggcgttcgccggcaaccgaatacgcgctgcgccagtcggtgagggcgggcgcttcgcaggccagctccgccagccctttgccgcgcagcgcctgcagcgccgcttcattgaattccagttcgccaacctgatgacgccagattttgccctggcgcagcgccgccagcgcctgctgctgcttccgggagcgtttcagaccgttaaggtcgacaacctgcccctgctcggtggcgaaccagtaccacagcggcgtggcgctggcgggtttgccctggcgcagcataacgggtaatgcatggaacagcacatcgccgatcgggtgatggtaatactcagccgcccacatcagcagtcgccagacagtcgtggagaagaccggctcgtcgtccagcgcttcggcgaccggttttagctcatccagcggcagttcgctgcgctcgctcaccgccgcgacaatgccgatccgctcctgtttgccgaacggcacccgcacccgacagcccgctttgaccgccatgccttcaggcagcaggtagtcaaaagtgcgcggtagcggaacgggtagggcaacgtgggcgacggacatgtcatcttcctgacttgaaatctggcgggatagtatacacattacgataaggcggcgcggatcagtttgcatatgctggtcaaattctgtatgattcgccgcctttgatgcgctttatatcgcattgaagattgaccattaccgcgtgcttcacgctgtcagcagcgtagaaggcgacgggaaattactaatatcgcgtggtgtctggcgttagggctggaagagcgacgcggccttaactgaggttctcccatgaaaaaaggtattcacccaaattacgacgaaattactgctacctgttcttgcggtaatgtcatgaaaatccgctccaccgttggtcacgacctgaacctcgacgtgtgcggcaaatgccacccgttcttcaccggcaaacagcgtgatgttgctaccggtggccgtgttgaccgcttcaacaagcgcttcagcatcccgggcagcaagtaagttgccagaagaagccgcctcagggcggcttttttgtctcttccgcctgcctgggcgggaaagaaaaaagggcggaagattattccgccctttttatcgtctcagtattcccacgtatccgggtcgattcccagttcacgcataatcgctttcgccgcttccgggatctcatcgctgcgctctttacgcaggtcttcatcgttaggcaacggttgtccggtaaaggcatgcagaaacgcttcgcacagcagctcgctgttggtcgcgtgacgcaggttattcacctgacgacgcgtgcgttcatcggtgaggatttttaacaccttcagaggaatggaaaccgtaattttctttacttgttcactcttcttaccgtgctcagcgtatgggctgatatattcgccgctccattcagccatgagataccttaatcctctgtttattagtgaagggccagaatattccgcccgggctataattgcgcgtagtttaccgtatgcgcgggctttctgacatgagataagccgccgacgacgtgcgctaatgcatataattttaacggctatttgcactttgctcaatctatacgcaaagaagtttagatgtccagatgtattgacgtctattgtgacaatgattactctggagcctgacttttcaccgattcagcccaggaacttcccaacatgacgcgtaaacaggccaccatcgcagtgcgtagcggtttaaatgacgacgagcagtacggttgcgttgtcccgccgattcacctctccagtacctataacttcaccggctttaatgaaccgcgcgcccacgactactcccgtcgtggcaatccgacgcgcgatgtggtgcagcgcgccttagcggagctggagggcggcgccggcgcggtgctgaccaataccggaatgtcggcgatcctgctggtgacgacagtgttccttaaaccgggcgatctgctggtggcgccgcacgactgctacggcggcagctaccgtctgttcgacagcctggcgaagcgcggctgctatcgcgtccagtttgtcgatcaaagcgatgagcaggcgctgcgggcggcgctggcggaaaaaccgaagctggtgttggtggaaagcccaagtaatccattgctgcgggtggtggatattgcgaaaatctgtggtctggcgcgtgaggccggggcaattagcgtggtggacaacaccttcctgagcccggcgttgcaaaacccgctggcgctgggcgccgatctggtgctgcattcctgtaccaaatacctcaatggtcactccgatgtggtggccggggtggtgattgccaaagatccggcaactgtcaccgaactggcatggtgggcgaataatattggcgtcaccggcagcgccttcgacagctatctgctgttgcgcgggctgcggacgctgtctccacggatggaagtggcgcagcgaaatgccctggcgatcgttgagtatctgaaaacccagccgctggtgaaaaagctgtatcatccatcgctgccggaaaaccaggggcatgaaattgcggcgcgtcagcaaaaaggttttggcgcaatgttaagcttcgagcttgacggtgacgagcagacgctgcgccgttttctgagcgggctgtcgctgtttacactggcggaatcgctggggggcgttgaaagcctgatttcccatgcggcaacgatgacgcatgccggcatggcgcctgaagcgcgtgccgccgccggaatttcagaaacgctcctgcgtatatcgaccggtattgaagatggtgaagatttaattgccgacctggaaaatggcttccgggcagcaaacgaggaataaagatgagtgtgattgcgcaggcaggggcgaagggtcgtcagctgcacaaatttggtgggagtagtttagcggatgcgaaatgttacctgcgcgtcgcggggatcatgaaggagtattcgcaggcgggggatatgatggtcgtctccgccgctggcagcaccaccaaccagctgatcagctggcttaagcttagccagagcgatcgccttgctgcgcatcaggttcagcagtcgcttcgccgctatcacaccgagctgattggcggtctgctggagcctgcggcggcggatacgttgatagccgcctttatccacgaccttgagcgtctggctggtctgctggacggcggggtttccgaagcggtctatgcggaagtggtcggccatggggaagtgtggtccgcgcgcctgatggcggcggttctcaaccagctgggtatggaagccgcctggctggacgcgcgcgcgttcctgcgcgcggaacgcgccgcgcagccgcaggtggatgagggattatcttacccactgctgcagcagctgatggcgcagcatcctaacaaacgtctggtggtgaccggctttatctcccgcaaccaggccggcgaaaccgtcctgctgggccgtaacgggtctgactactctgccacccagatcggcgcgctggcgggcgcctcccgggtcactatctggagcgacgttgccggggtgtacagcgcggatccgcgcaaggtgaaagacgcctgcctgctgccgctgctgcgtctggacgaagccagcgagctggcgcgcctggccgcgccggtgctccatgcccgcacgctacagccggtttccgccagtgatatcgatctgcagttacgctgcagctacacgccggaacagggttccacgcgcattgagcgcgtgctggcctccggtaccggcgcacggattgtcaccagccatgacgacgtctgcctggtggagttccaggtgccggccggtcacgatttcaaactggcgcataaagagctggacgctctgctcaaacgcgcccagctgcgcccgttagccgttggcgtccatgccgaccgtaagctgctgcagttctgctatacctccgaggtggccgacagcgcgctgaaattgctcgatgaagccggtctgccgggcgagctgcgtctgcgtcagaagctggcgctggtggcgatggtgggcgcgggagtcacccgtaacccgctgcactgccaccgtttctggcagcagctcaaagggcagccggtggagttcacctggcagtctgaagaggggatcagcctggtggcggtgctacgcgccgggccgacggaaagcctgatccaggggctgcatcagtccttgtttcgcgccgaaaagcgtattggcctgatgctgttcggcaaagggaatattggttcccgctggctggagcttttcgcccgtgaacaaactacgctctcggcgcgtaccggtttcgagtttattctcgccggcgtagtcgacagtaaacgcagcctgctgaattacgacgggctggatgccagccgggcgctggctttcttcaacgatgaagcggtggagcaggatgaagagtcgctgttcctgtggatgcgcgcgcacccgtatgatgatttagtggtgctggacgtcaccgccagcgaacagctggccgaccagtatcttgatttcgccagccatggcttccacgtcattagcgccaacaagctggcgggcgccagcagcagtgataaatatcgtcagatccacgacgcgtttgagaagacggggcgccactggttgtataacgccaccgtgggcgccggcttgccggtgaaccatacggtgcgcgacctgatcgacagcggcgatactattctcggcctgagcggtatcttctcgggaacgctctcctggctgttcctgcagtttgatggcaccgtgccgttcaccgacctggtggatcaggcgtggcagcaggggctgaccgagccggatccgcgcgtcgatctgtccggtaaggatgtgatgcgtaagctggtgatcctcgcgcgggaagcgggctatgacatcgaaccggatcaggtgcgtgtggaatcactggtgccggcgcactgtgaagaggggtcggtcgatcacttctttgagaatggcgaagagctgaacgagcagatgctgcagcgtctggaagcggcccgcgagatggggctggtgctccgctacgtggcgcgctttgatgccaacggcaaagcacgcgtcggtgtggaagcggtacgcgaagagcacccgctggcggcgctgctgccgtgcgataacgtgtttgccatcgaaagccgctggtatcgcgataacccgctggtgatccgcgggcccggcgccgggcgcgatgtgaccgccggggcgatccagtcggatattaaccgcctggcgcagctgctgtaagcgtcgcgttatactcttgaaccagtgaggccactatttgcgttacgcgccctgcggaatacagggcgctctgcgcaaacgcgggtctgtttttcagccatattgtaaaccgtcggctggccgcaaggtctggtagaaaggcgttctcttctacagtgccggcaagccggcagaccattttctgattctcttcctgcgtccaacgctgccatgaattttgccaccagccatgatgggttttccccagtagctgccacggagccgggctggctgggttccttatctcttcttccacataccatagatcgccttgccgctgacgaaaaagcggcgcccaggcaacgatcgccgcgccgcgtaaaaagcattcatgcgcaataacgtgcgttttcacctctggaaaccgctggctgagcagtttgaaatgaccgtgcgcggcgataaccgggcgcaatatattgccgcgggcatggcgcttttgcattgcgctgccgtactggatttcatcgaactgactgcgttgtaaaaagcgcatttcagtgagagaaatacgttgaataatatcgtcagtctcctccctgtcggcttgtccgccgcgccagcgatagcgtaatgattcgcctaccgcgaaaggagtgaaattagaggtaagatgaataacattaccgcgcacggcatcaaagcttaataaaaaatagagcttttgcccggcggcattaccctggaatggcgctatcaacggtacgctgcaaatacgtcgtggggcttcaattggggcgatgtgtgggaattttggcgtccagacctttttacagtggcggcactgaaggcgttgcgtaccctgcggattgcggccgtagcgaataatatcccgctgatagcataccgggcaaaaatagccgtagcggcgggcatgatccgtcagataagccgccagccaggggcggaattcccgttcgttaaacagggggggatagctgccgcaggctgcgcagtagagcgccgggtagcccagccgaaaattcgggaaatgatactcagccgcagacggtaaacctaaattgcggcagccaaaagttttacaggcgttaatggtaaagagagtatccactggcaggtcaataccaacgatttttacaggtcgttaattttgtcctgctcaggttgcatacaactgtgaatgctctcacataaaaaagtctttcagaacgtaacttagcggttctttatcactctgaaaggaactccgatgaaactaaaagcaatgagcgcagcacttctgttgactttgcctttctgggcctgcgccaaagatgtcaccataatttataccaacgatcttcatgcccatgtcgaaccttataaagtgccatggatagcggatggtaaacgagatattggtggttgggcgaatatcacgacgatggtgaaacaggaaaaagcgaaaaataacgcgacctggttttttgatgccggggattattttaccgggccttacatcagtagcctgacgaagggcaaagcgataatcgatattatgaatacgatgtcctacgatgcggtgactatcggtaatcatgagttcgatcacggctgggataatacgttgcttcagcttagccaggcgacattcccgattgttcagggcaatattttttatcagaacagcgataaatcgttctgggataagccctataccattatcgaaaaagatggcgtgaaaattggcgtgattggcctgcacggcgtgtttgcttttaatgacaccgtttctgccgcgacgcgagtgggtatcgaagcgcgcgatgaggtgaaatggctacagcattatatcgatgaacttaacggtaaagtggatctgaccgtggccctgatccatgaaggcgtcccggcgcgtcagtcgagccaggggggaaccgatgtgcgtcgtgcgctggataaagatattcagactgcgggtcaggtgaaaggcctggacgttttaattaccggccatgctcacgttggcacaccggagcccattaaagtgggtaatacgttgatcctttctaccgatagcggcggcatcgatgtgggtaaactggtgctggattatcaggagaaaccgcaccaattcacggtgaagcactttgagctgaagacgctttatgccgatgagtggaagcctgatccgcagacaaaacaggtcatcgacggctggaataagcaacttgaacaactggtgcagcaggtcattacacaatcgcccgttgaactgacccgtgcgtatggcatctcttcgccgttgggcaatcttgccgctgacgccttgctgttggcagcaggtaggagtacgcagatggcgttaaccaactcgggcgggatccggaatgagatccccgccggggcggtgagcatgggcgccgttatcagcaccttcccgtttcccaacgagctggtcaccatggatctaaccgggaagcagttgcgtagcctgatggagcatggcgccgggttgagcaacggcgtgctgcaggtctcccggggactggaaatgaagtatgacagcagcaaacctgtgggccagcgcgttgtgttattcaggctaaacggtaaaccgattgacgatacgacggtttaccatattgccaccaacagcttccttgcagatggcggcgatggttttgtcgcgtttaccgaggggcaggcgcgtaatacctccggcggctattacgtttcaaatgcggtcgtagactatttcaaagccgggcaaaagataacggatgagcagcttaacgggcagcgcgttgtcgatgtgaagaaataagtttttaaggccgggcagtcagcccggccttaagcgatcagtgggccgcaaataccgccctggcggcaaacaggccgttgagggccgccgggaatccggcatagactgccatctgcatgatcgcttccgtaatctcctcttgcgtcaggccgacgtttaatcctgcggcaatgtgtactttcagctgtggctcggcgttacccaacgccgtgagcgcggcgatggtggcgatttcccggctgcgtaaatcgagccctggcctggcgtaaatatcgccgaaggggaactcaatcagatagcgggcgaaatcgggggcgatatcccgcaggctgtcgacgacagcttccccgcccttaccatccacccgctgaagcatttcctgaccgatgatataacgttcgctggacatcgttttttcctctctgtgatggtgcgttaagaggaagggtagggaagtgtgccggacttgagtaatacccttttcgtgataccttttcagtatgacaacttcaagattacattctctggatattcgcctgctgcgcgcctttgccgtggtagcggaggaaaataacatcagccgggcggcgcagcggttatttatctcgcagccgccgctgacccgccatatccgccatctggaagcgcagctgggggtgacgctgtttcagcgccatagcaaaggcctgatcctgaccgacgcgggtagagaggtgctggagatgattcaacctctgctggcgctccaggaacgcacgctggcggcattgagtgagctcgccgcccactcgccgcaggctctacgtctgggcgtgacgacggccttcgaacagggcattttcgccgccgttgaggctgcgctgagcgaacatacccgcgcgttgcatatcacccgccacgcctcaccggcgctggctcagcaggtacgcaaaggcaaactcgatgcggcgctggtcgcgttgccgctcaatactgaagggctgcacctgcacccattgccgtatcatgagccgctcattgcggcattaccggcctcctggccggaagccgccaggccagagctgacgttaagcgcgctcaatcatcggccgctgttctggtttaaacgcgagcgtaatcctggtttctttgactacacgcgccgcattttcgaccgggctggctatgtcccgacgtatgtggaagagccggccgagcatgatgtgctgctggcgcgtattgcgcgcggggaaggcatgatcctgctgccggcgtccttttccgcgattcagcgtcagggggtggcgttctgcccggtggctgagggcgacgcgatgccgttaagccttggggtgatttatccgcctcaccaggcagagtccgtgcagcaatggctttctctgctggatggcattctggcgactggctagtctcaggctgactcgcgagccaccttatattgcccaccgagccgcttcctgtgcgtggccaggtgatcggaagatgaacttttttcatgtaggtgacctattcctcactctttacgcagatttttctattgacgcccgcgcgcttttccgtcatttttacatctggacgtctaaacgtatagaagttcgcaatataacagccattacatgcgattgatgaggtaaggtatgagcttttttcacgccaatcagcgggaagccctgaatcagagcctggcggaagtccagggccagattaatgtgtcttttgaattctttccgccgcgcaccagtgaaatggagcaaaccctgtggaaatccatcgatcgcctgagcagtctgaaaccgaagtttgtttcggtaacctatggcgcgaactctggcgagcgcgatcgcacccacagcatcatcaaaggcattaaagagcgaaccggtctggaagcagcgccgcacctgacctgtatcgatgccagccgcgatgagttgcgcactatcgctcaggattactggaacaacggtatccgccatatcgtcgccctgcgcggcgacctgccgccgggcagcggtaaaccggatatgtacgccgccgatctggtgacgttgctgaaagaggtaggcgattttgatatctctgtcgccgcgtatccggaagtgcatccggaggcgaaaagcgcgcaggcggatttactgaacctgaagcgcaaagtagaagcaggggccaaccgcgcgatcacccagttcttcttcgatgtggaaagctacctgcgttttcgcgatcgctgcgtctcggcaggcatcgacgtggaaatcattcccggtatcctgccggtctccaactttaaacaggcgaaaaagtttgcggatatgaccaacgtccgtatcccggtgtggatgtcaaaaatgttcgaagggctggataacgacgccgaaacccgtcaactggtgggggcgaatatcgccatggacatggtgaagatcttaagccgggaaggggtcaaggatttccacttctacaccctgaaccgcgccgagatgagctacgccatctgccatacgctgggcgtacgcccggcctgagttttcattaacgtttagtgcgatggcgaagccggtattcgccatcgcttttttttgcccaaaacgctgatacaggtcaggggagagcagaagataaagcgcgtatagtgccagcctgataattgacagggatgggttatgcaatggcaaggaagagcgatccactggcgtttggcggtttggcgttattaacgctgatctggagctttagctggatcgcgatgaagcaagtgacgagctatatcggcgcttttgacttcacggcgctgcgctgtatttttggcgccgtggtgcaatggatagtgatgttgatccgcggtaaagcgctcaagccgacgcctttcggctacaccctggcgatcgcgttattgcaaacctgtggcatggtcggtctggcacagtgggcgctaatgagcggtggcgccggtaaagtggcgatcctgagttataccatgccattctgggtagtggtgatggccgcgttattcttaggtgagcgcatgcggcgatggcagtatatcgccatcggggtggcatgcgtgggcctgatactcgtacttcagccttggcaactcgactttacctccctgaaaagcgccttgctggcgatcctctccggcgtgagctggggggcaggtgcgatcgtcgcgaagcgtatgtatacccggtatccgcaggttgatttgctggcgctaacgacatggcagatgctatatgccgccgtagtaatgagcgtagtggcctggctcgtcccgcaacaggcggtagactggcagcccgacgttttctgggccctggcttacagcgcaatccttgcaacggcgctggcctggagtctgtggctttttgtactgcgtaatttaccggcaagtatagccggtctgagtacgctggccgtaccggtctgtggcgtgctattttcctggtggctactacatgaaaatccaggaaaggtggaaggttgtggcattgcgttgatagtactggcgttggcgatgatcagtatcaagagacgaggggcatagcctgctccggcctgcagagatgcataaaaaacacccggctgtcgccgggtgttttgctctggtttattcccattcctgcaggaagcgctgaccatactggtcggccaccagcagcgcggcgtagacctggtcggaatcaacgccgcccggcatattgtgaatggtttcgccttcagcgcaggcggcttccgccaccagacgcattttggtcgggatatcacctttgatatccagctgcgccagggtgatcggcagcccaacgctgtggcacagcgcggcgacggtctctatttcgtccaccggcgcattttccagcaccagctgcgtcagggttccgaacgccactttttccccgtgataatagtgatgggcgtcagggatggccgtcatgccgttatgaatcgcgtgcgccgccgcgagaccaccgctttcgaaacccacgccgctcagataggtgttggcttccaccacccgctccagcgccggggtgaccacgtgctgttcggcggccagcatcgctttttcaccctcttcgagtaaggtgttgtagcatagctcggccagcgccagcgcggcctgggtgcacttcccgcccgccatggtggtggcgccgctacgggagcaggcgcgggcttcgaaccaggtagccagcgcatcgccaatcccggcggccagcaggcgggccggcgcgccggcaacgatctgcgtatcgacaatgaccatgttggggttgcgcggcagcatcaggtagctgtcgaattccccttcgtcggtgtatatcaccgacagcgcgctgcacggcgcatcggtggaggcgatggtgggggcgatcgccaccggcacattcataaagtgggccagcgctttcgcggtatccagggttttgccaccgccgatccccagcacggcggtgcacttcgcgttgccggcgatatcgcgtaggcggttgatttcattatgcgaacactcaccgccaaacggcgcgatttcagccgccaggccagcgtcggccaggcttttacgcagcatctcttccgcaaaccccaggacgaacttatcaccgaccaccagccagcgctcggccagcggtttcagatagtcgccgaggcgcttgatggcgcctgtgccctggatatatttgcctggtgattgaataatgcgatccatttcgattcctcctcgatgaccgtgacgccgcccgcaggcggctcgcggatccggttacagattcagcgcgccaaaggcgttattccagtcctgttcaaacttctctatggctgactctaccgcaggggtgccgagcatttgttgcgctacatctagtggaagggtgattgcttcgcagccagccagcagacaatccagcgcctggcgtggcgttttgaagcttgccgccagaactttgctctcgggcgcatgcatttccagcagggattgcagctcctgcaccatgcggatgccgtccccgccctgggcgtcgacgcggttaacgtaaggcgcgacgtactttgcgccggccagcgcggccagcaggccttgcgaagcgctgtagacggcggtgccaagggtcgggatgccttctttcttcagcagtttgatagcggcgagcccttcggcggtgaccgggattttgaccacaatgcccggcacggcattgctcagacgtttggcctcttccaccatgccctgcgcgtcgcggctcatggtctgcgcgaagagggtgccctccggaccgacggctttttgcaggcgcggcagcacatcccagaccgggactttaccggcggcgataatgctcgggttggtggttaccccggccagcgggtagatgcgggccaggcgttccacttcggcgacgttggcggtatccagatagagttccattgtgttttcctcaatgcttaattcggtgctgtcgttgaggtaagcatacggctttcgttcgaaggatcgccagatgacaaatttgccaaaaactggataaatgtacgcatcgtgattaaggatgatttagatcacatttatcggcgctggctgggatgggaggtaactatagcgcgcacaaaagtcaggtttaacacacaaaaatctagttttttaccggggatgctttttccgtcagctggctatggtactggcggcggtattcagacggcgagcgttccgtagttttgcggaacaggcggcagaagtagttgctgtcggcgaagccgcaggcgtgggcgatgtctttcactttcatatcgtggcccttcagcagcatacgggcctgttcgagacgaatatggtttagatattcattgaagcccattggcccacatttctggaacagatgggaaagatagttgggagagaggtagaacgcctgggccaccgattcccggctcagcggttccgcataatggatgtccatatattggcggatcgcttcgaacaacgcctggctgcgcgaggaggtttgcgcctggctgccgagaagatcatggcagtggctgagcaggctgacgacgatgctgcgggcggtttgctgctcctgcggttgcatccggagttcattgagcgcctgcagcagaaatgatccgacgcgcggcccgcggcgcagcgcctgccgcttgtcgacaacagttatcgccttgccattccagtgctgcagcgagcactccagctgctgcttagcgaacaggatgcttaacagcaggcagggcgcttgccactgcgggcagttccagctatcgccagggatatagagcacgtcatgggcctcaaggagcggggcgttatcgccgagcgcctggtcgggcaactgcccatcaaggagaatattcagacggggaaaatccacctgcaccaccggctcagcaggcgagcgcgtctcgccggcgaaataaacccggccgaggctggtctgcttttttagcaatgcatcaataagttgattgatatcgttgtccatcattcttccgttcagcgcatcacccttttcatcataccggacattattccagcggtaaaagcgcttgcctgtcgctcttgcctcccagataagatatgttatatcgtaacaatttgtcgccattgatagcaaactcaggagagagtaatgaccagaaagatccccctgctggccttaggattcggcatggctttagccagcgcccaggcgttcgcccacggcaaccatagccatggcccggcgttaaccgaagtggagcgtcaggccagcgaaggcatttttgcggataaagatgtgcaggaccgcgcgctgagcgactgggaaggcgtctggcagtcggtgaacccgtatctgctcaatggcgacctcgatccggtgctggagcagaaggcgaaaaagcccggcggcaagagcgtggaggagtatcgcgcctattataagaagggctacgccaccgatgtggagcagattggcattgaagatgacgtgattgagttccacgttggccagaccgtcaatagctgcaaataccgctattcaggctataaaattctgcattacgcctccggtaagaagggcgtgcgttatctgttcgagtgccagcagggcgatgccaacgcgccgaaatttgtgcaattcagcgaccatatcattggcccgcgtaaatcacagcatttccatattttcatgggcaatgaatcacaggaggcgttgctgaaagagatggataactggccgacctattatccgtatgcgctgcataaagaacagatcgttgatgagatgctgcaccactagaacgggcggaaaacccccggccgggcggccggggggagatagattaaccggtgttacgcataccggcggcgacgccggcgatggtgaccatcagcgcttgttcaacgcgcggatccgggtccttgccctcttcttcagcctggcgtgaacggtgcagcagttccgcctgcaggacgttcagcgggtcggtatagatattacgcagctggatagactcggcgatccacggcaggtcggccatcagatgggagtcgttggcgatggccagcacgacgttgatatcggcagccagcagcttgcgcagctcggaacccagcgcccacagctccggcttcaccaggcgctgatcgtagtactccgccagccacaggtcggccttcgagtaaaccatctccagcatgccgaggcgggtagagaagaacggccagtcgcgacacatggcttccagttcactctgttttccaccttcgaccaccttctgcagcgcagcgccagcgcccagccaggccggcagcatcaggcggttctgggtccaggcgaagatccacggaatggcgcgcagcgactcgacgccgccggttggacgacgttttgccggacgcgaacccagcggcagtttgcccagctcctgctccggggtcgcagagcggaagtaagggacgaaatctttgttttcacgcacgtagccgcgatacatcttgcacgacacgtcggacagctcggccatgatgtcgcgccattctgctttcggctccggcggcggcagcaggttggcttccagaatggcgctggtatacagcgacaggctgctgatggtgacttccggcaggccgtacttaaagcggatcatctcgccctgctcggtaacgcgcaggccgcctttcaggcttcccggcggctgcgagagcagcgcggcgtgggccggcgcgccgccgcggccgatagagccgccgcgaccgtggaacagcgtcagttcaataccggctttttcgcaggttttgatcagcgcgtcctgcgcctggtactgcgcccaggaggcggccatcacgccggcatctttagcggagtcagagtagccgatcatgaccatctgcttgccctggataaagccgcggtaccagtcgatattcagcagctgggtcatgacgtcgttggcgttgttgaggtcatccagcgtttcgaacagcggggccaccggcagagcaaagccaatcccggcttctttcagcaggagatgaaccgccagcacatcggacggcgttttcgccatcgagatcacgtaggcggcgatcgatccgcgcggcgcctcggcgatcaccttgcaggtgtcgagaacttcacgcgtctcttcgcttggctcccactggcgcggcagcagcggacgtttggaattcagttcgcggatcaggaaagcctgtttgtcggcttccgaccagctttcgtagtcgccgatcccgaggtaacgggtcatttcacccagcgcttcggtatggcgggtgctttcctgacgaatatcaatacgcaccagcggtacgccgaaagacttcacgcggcgcagggtgtcgagcagttcgccgttggcgataatgcccatgccgcaggcctgcagcgatttatagcaggcgtacagcggctcccacagctgctcgttctgagtgatcagtcccgccggtttcggcagcttctgacctttcagacgcgcttccagccaggcctgggtctccatcagctgagagcgcagttttttcatcagataacggtaaggttcctgagcgccctcggcgccagccagggcgcgcagctcgtcggtacactccaccatcgacagctcggagatcagcacctgcacgtctttgaggaacaggtcggtcgctttccagcggctgagcagcagcacgtggcgggtgatgtcggcagtcacgttcgggttgccgtcgcggtcgccgcccatccacgaggtgaaacgcaccgggacgaagtccaccggcagctgatagccaaggttggcttccagctgttcgttcagctcgcgcagatagttaggcaccccttcccacaggctgttttccaccaccgcgaagccccatttggcttcatcgaccggggaagggcggtgcttacgaatttcatcggtatgccacgactgggcgatcagctggcgcagacggcgcatcagctgatggtgctcatagtcagcgatatctttgttgtccaactgcttaaggcagttgttcacttccaccattttatggatcagcgtccggcgggtgatctcggtcgggtgggcggttaacaccagctccagagacagcgattccaccgcttgtttgatggtctcttcgttgagattgggttggtctttgagctttctcagggtacgcgcaatgacttccggattgctggccgcttcgccattggccgaaatgctgtggtactgctcagcggtgttggccagattcagaaactggctgaaggcacgggccaccggcagcagttcgtcgtttgacaaattctgcagcgtggtcagcagctcctggcggttagcttcgttgccggcgcgtgaagatttggacaacttacggatagtttcgacacgatcaagaatattttctcccaatgcatccttgatggtatcgcccagcaccttgccgagcatactgacattactacgcaatgcggaatattgttcgttcatgttaccccagacaccccatctcattttattttgttatatccgctgcgctggaacgtgagcaacggataagcaacccgtcttttataaagccacgtaaatacccccacgtcaattactgcgaaatcgcttcagcaaacgagtaaatcgccgtaatttgcgaaatttaattcagggagcgctggataagtatcgcttatggaaatgtgacgatcgtcaccgttccgccccgggagaacggggcggaaaaagagggcgattttagtgccagcagaagtgatgaaccacctggctaatcagctcccgggtcggcttgataaagcgcgtctccagatactcgtcaggctgatgggcctgattgatggagcccgggccgagaaccagcgtcggacacagcgtctggataaacggcgcttcggtgcagtaattcaccacgtcggtctgcgcgccaagcagtttctcgaccacctgcaccagcttatggtccggcgggcactcgtagccggggatcggcggatgcagctcagagaccgtcaggcggcccggccagcgttcgctgaccggggccagcgcctcgcccaacagaccattaagatcgtttagggtcatccccggcagcgggcggatatccatatgcagttcacagcaggcgcagatacggtttgaggcatcgccgccatggatagcgcccaggttgagggttgggtaagggaccgtaaacgcctcgaagtgatagcgctctttaagcagatcgcgcaactgcataatccggccgatggcgtcgtgcatcagctcaatcgcgttgaccccgcgcgccggatcgctggagtggccggactggccctgaatacggatcgcgttggacatatggcctttgtgggcgcggatcggctgcagggaggtgggctcgccgatgatggcgcagtccgggcgcagccgggtggtttcggcaaagtagcgcgcgccggtcatgctggtctcttcgtcggcagtggccagaatatacagcggctttttcagcgtggtgacgtcgacatcgcgcagggcgtcgagaataaaggcgaagaagcctttcatatcggccgtgccgagaccgtagagcttgttatcgtgttcggtgagggtgaacgggtcgcgcgtccagcggccatcatcgaacggcacggtatcggtatgcccggcgagcagcaggccgccggcgccgtgtccggtgctggccagcaggttgaatttatggcgcgtatccggcaccggctgtatctcaacattgaagccgagatcgcggaaccagcctgccagcaaattgattaaagactcattgctttgatcgagagcctcttcagtcgcgctgatggatggtgtggcgatcaacgcgcggtaaatctcgataaagggcggtaaattgtttttcattgttgacacaccttgggtcgtgatagtatcaatattcatgcatttattttgaataaaaatacaatatcgttgagcgtaagaaaacccatcgaatgtaaggagatgcgcttccaatgttaaatacgctgattgtgggtgccagtggttatgccggcgcagagctggtgacctatatcaatcgtcatccgcatatgaacataaccgctttgacggtctccgcgcaaagcaatgatgcggggaaattaatttccgacctgcatccgcagctcaaaggcattgtcgatatgccgctgcagccgatgtccgatatcagcgaattcagcgctggcgtggacgtggtgtttctcgccaccgcgcacgaagtgagtcacgatctggcgccgcagttccttgccgctggctgcgtggtgttcgatctctccggtgccttccgcgttaacgatggggcgttctacgaaaaatattacggtttcactcatcagcatcccgacctgctcaaacaggcggtgtatggtctggcggagtggagcgcggatgcgcttaaagacgcgcagttaatcgcagtgccaggctgctatccgacggcggcgcagctgtcgctgaagccgctgattgaggccaatctgctggatctcaaccagtggccggtaatcaacgctaccagcggggtgagcggcgcgggtcgtaaagccgcgatcggcaacagcttctgtgaagttagcctgcagccgtacggcatatttaaccatcgccatcagccggagattgccagccacctcggggcaaaggtaatttttaccccgcacctgggtaattttaagcgcggcatcctggaaaccattacctgccgcctgaagccgggcgtcggccatgcgcagatcgcggcggtttaccagcaggcttacgccgataaaccactggtacgtttatatgataaaggcgtgcccgctttgaaaaacgtcgaaggcctgccattctgtgatatcggttttgccgtgcaggacgatcatctcatcgtcgtcgcggcagaggataacctgctgaaaggcgccgcagcgcaggcggtgcagtgcgcgaatattcgtttcggcttcgctgagacgcagtctcttatttaaggtgtgatgatgaacccattaattatcaaacttggcggcgtattactcgatagcgaagaagcgctggagcgcctgtttaccgcgctggttaactaccgtgaagcgcaccagcgtccgctgattatcgtccacggcggcggctgcgtggtggatgagctgatgaagcagctcaacctgccggtgcagaagaaaaatggcctgcgcgttacgccggctgagcaaatcgacatcatcaccggcgcgctggcgggaaccgccaacaagacgctgctggcgtgggcgaaaaaacatggtatttcctcggtaggcctgttcctcggcgatggcgatagcgtgaaggtgacgcagctggatgctgagctgggccatgtcgggctggcgcagccgggttccccgacgctgatcaacaccctgttggccggcggttacctgccggtggtgagctctatcggggtgaccgatgaaggccagctgatgaacgtcaacgctgaccaggcggcgacagcgctggcggccaccctgggggcggatctgatcctgttgtctgacgttagcggtatcctcgacggtaaagggcagcgcattgccgagatgaccgccgagaaagcggagcagctgatcgagcaggggattatcaccgacggcatgattgttaaagtgaatgcggcccttgacgccgcacgtgccctgggccgtccggtggatatcgcctcctggcgtcacgccgagcagctgccggcgttatttaacggcacgccgatcggcacacgtattctggcttaagatttcatgcccggcggcgcgtcgtctgccgggcttacaagaccgtaggccgagcggcacaatgccgccggcggaactaacgaataaaggaagcatgttatggcactttggggcgggcgttttacacaggcagcagatcaacggttcaaacagttcaacgactcgttgcgcttcgactatcgtctggcggagcaggatatcgttggctctgtcgcctggtcgaaagcgctggtaacggtcggcgttctgagtgccgctgaacagcagcagctggaagaagcgctgaacgtgctgctggaagaggtgcgcgccaatccgcagcaaatcctcgccagcgatgccgaagatattcacagctgggtggaaggcaagctgatcgataaagtgggccagctgggcaagaaactgcacaccgggcgcagccgtaacgaccaggtcgccaccgatcttaaactgtggtgcaaagataccgttgtcgaactgctctcggcgaaccgccagctgcagagcgcgctggtggagaccgcccagcagaatcaggacgcggtaatgccggggtacacccacctgcagcgcgcccagccggtgaccttcgcgcactggtgtctggcctacgttgaaatgctggcgcgtgacgaaagccgtctgcaggacgcgctgaagcgcctcgacgtcagcccgctgggctgcggcgcgctggcggggacggcgtatgagatcgaccgcgagcagctggccggctggctgggctttgcctccgccacccgcaacagcctcgacagcgtgtccgatcgcgatcatgtgctggagctgctttccgatgcggctatcggtatggtgcatctgtcgcgctttgcggaagatctgattttctttaactccggcgaggcgaacttcgtcgagctttccgaccgcgtgacctccggctcctcgctgatgccgcagaagaaaaacccggacgccctggagcttatccgtggcaaatgcggccgcgtgcagggtgcgctgaccggcatgatgatgacgctgaaaggactgccgctggcctacaacaaagacatgcaggaagataaagaggggcttttcgacgccctggatacctggctcgactgcctgcatatggcggccctggtgctggacggcattcaggtaaaacgcccgcgctgtgcggaagcggcgcagcagggctatgccaacgccactgagctggcggattatctggtggcgaaaggcgtaccgttccgcgaggcgcaccatattgtcggtgaagcggtagtggaagccattgcgcaagggaaaccgctggaagcgctgaccctggccgatctgcagaaattcagcccggtgattgcggacgatgtgtatccgatcctgtcgctgcagtcttgcctcgagaaacgcgcagcgaaaggcggcgtctcgccgcagcaggtagcccaggctatcaacgaggcgaaggctcgtttaagctaatccttagatatctgccctccctgacccggccaagcccagcgacgccgggttttttatgcaaaaaaaaagcggacgcaaggtccgcaaaagttcacgttggctttagttgttcgggtagagaaacagtgtgacgggtcagtgattttcacaggtagaccgtctttatgggcgtattattgaacagaaaacttgatagggataatcgttcgttgctatgctatctatcgccatggactatcgtggcgatggaggatgaataatgaatattcgcgatcttgaatacctggtagcgctcgccgaacaccgccacttccggcgggcggctgactcatgccatgtgagccaaccgacgctcagcggacagatccgcaagctggaggatgagcttggcgtcatgctgctggagcgcaccagccgtaaggttctgtttacccaggcggggctgttgctggtggatcaggcgcgtaccgtgttacgcgaagtaaaagtgctcaaggaaatggcaagccaacaaggggaaaccatgtccgggccgctgcatatcggcctgatcccgacaattggcccgtacctgctgccgcacatcattccgatgctgcatcagaccttcccgaagctggaaatgtatctgcacgaagcgcagacccatcagctgctggctcagctcgacagcggtaagctcgactgcgccatcctggcgctggtcaaagagagcgaggcctttatcgaggtgccgctgttcgatgagccgatgatgctggctatttatgaagatcatccgtgggcgaaccgcgatcgggtgccgatgtcggatctggccggtgaaaagctgctgatgctggaggatggccactgtctgcgcgatcaggcgatgggcttctgctttgaagcgggggcggatgaggatacccacttccgcgcgaccagcctggaaacgctgcgcaatatggtggcggcaggcagcggcattaccctgctgccggcgctggcggtgccgcaggagagaaaacgcgatggcgtagtgtacctgccgtgcattaagccagagccaagacgcaccatcggtctggtttatcgtccgggctccccgctgcgcagccgctatgaacatctggcggaggccatccgcggcacgatggatggccatttcgacaaggcgttaaaacaggcggtttaagccgttcagcgcggcaacccggtacgcttccgccatggtcgggtagttaaaggtggtgttgacgaagtactcaatggtgttaccgccgcctttctgctccatgatcgcctggccgatatgaataatttcggccgcgcgctcgccaaagcagtgaatgccaaggatctccttggtttcacgatggaacaggatcttcagcgtaccaacgctcataccgacgatttgcgcccgcgccaggtgtttaaactgggcgcggcccacctcatacggcactttcatcgccgtcagctgctgctctgttttcccgacggagctgatttccggaatggtatagatcccggtcgggatatcttcaatcagatgcgctgaggcttcgcctttcaccagcgcctgggcggcaatgcgtccttgatcgtaagcggcagaagccaggcttggatagccgatgacatcgccaaccgcatagatgtgcgggagggcggtctgatacatgctgttgaccttcagctgaccgcggctgtcggtctgcagaccgatattttccagcgccagggtgtcggtgttgccggtgcggccgttagcgtacagcaggcaatcggccttcagctttttgccggacttcaggtgcatgatcaccccgtcatccaccccttcaattttctcatactcctcgttgtggcgaataaccacgccgctgttccagaagtgataagagagcgagtctgacatctcctgatcgaggaaggccagcagacgatcgcgggtgttgatcagatcgaccttcacctccatgccgcggaagatcgacgcatattcacaaccgatcaccccggcgccgtaaatgatcacatggcgcggctcatgctgcaggctgagaatcgaatcgctgtcatagatgcgcgggtggtggaaatcgacatccgccggatggtaggggcgcgatccgcaggcgataacgaatttctccgcggtcacagtctcgaccgtgccgtcatggcactccagcgccagagtatgctcatccacgaagtgggcattgccctgcagaatttcacagtggttgcgctcatagaatccctggcgcatatgagtctgctggttgatgacgctgtcggcatggttaaggatgtcggcgaaagaagagcgaagaaggcgggagtggtcgctgtagagggggttttggttaaactcgataatacggctgacggcatggcggagggctttcgacgggatggtgccccagtgggtgcaaccgccgccgacattatggtagcgctcgatgacggcaacgcgtgctccctgtttcaccagtcccatggcggcgccttccccgccaggaccggaaccaatcactattgcatcatagtcccaagagtgtgacatggcattactcacctgttttatacataaaataaacacgatgataacattcgctgcgctttaacccaattatcgttgtgcttttttgcagcataaaagcagaaacggctcgtaaacaatcattcacaatccagggcaaaccgattagttttaatctctggtatagtgccagcagggctattggaaggattcatacatcgtgatgggcgtaagagcacaacaaaaagaaaaaacccgccgttcgctggtggaagcggcattcagccaacttagcgctgagcggagtttcgccagcctgagcttgcgtgaagtggcacgggaagcagggatcgcgccgacgtccttttatcgtcattttcgcgacgtcgatgagctgggcctgacgatggtcgatgagagcggactgatgttgcgccagctgatgcgccaggcgcgccagcggatagccaaaggcggcagcgtgatccgcacctcggtctccacctttatggaatttatcggtaacaacccgaacgccttccgcctgctgctgcgcgagcgctcgggaacttctgcggcgtttcgcgccgccgtcgcacgcgagatccagcactttattgcggaactcgccgactatttagaactcgaaaaccatatgccgcgcgcctttaccgaagcgcaggctgaagctatggtcaccatcgtttttagcgctggcgcggaagcgctggatgtcggccctgagcagcgccggcagctggaggaacggttggtactgcagcttcgaatgatctcgaaaggcgcgtattactggtatcgccgtgaacaagaaaaaatgtcacatcattccgaataacgtgaaggacgagcaatgaaacactcagttcaagataaaggtacgctgttgctggcgctgattgccgggttatccattaatggtgcctttgcggcgctgttcagttcgatagttccgttttccgtcttccccattttatccctgctgctgacggtctattgtctgcatcagcgctatcagaatcgcagtatgcccgttgggctaccgggcctggccgccgccttttttattctcggggtgctgttgtacagcaccgtcgtgcgtgcggagtacccggatatcggttctaacttcttcccggccgttctgtccgtcgcgatggtcttctggatcggctacaagatgcgtaaccgcaaagataccgcagccgagtaagccgccagcggtaaaaaaaccggcaatatgacattgccggtttttttgggcctatttgcgggtcagcagaacgccgcactccatgtgatgggtatacgggaactggtcgaacagcgccagccgggtaacgttgtgcgtctggcttagcgtttccagattgcgacacagcgtttccgggttgcacgaaatgtacaaaatacgcggataggcctgcaccattttttccgtctcgctgtccagcccgctgcgcggtggatcgacgaagatggtttcgcactgatagctatgcagatcgataccctgcagccggttgaactgccgcaccccgttcatcgcctgagtaaactcttccgccgccatgcggataatctgcacgttgtcgatatggttagcggcgatgttgtactgcgccgccgccaccgacggtttggcgatttcggtggccaatacgcgatcgaaattacgcgccagcgccagcgagaagttaccgttgccgcagtacaattccagcaggtcgccagtcgcccctttggtgacatccagtgcccactccagcatctgaatgttcatggccgcgttcggttgagtaaagctgttttccacctgacggtagatcatctcccgcccgccaaccggcaggcgttcatctatataatcctgatcgagctcgattttagttttggtcgcccgcccaatcagatgcacattgagcccctgggctcgcagggcgtcacgcagcgcctccgcttgctctcgccaggcatcgtccagctttttatgatacagcaccgaaacgaccgcctggttgctgagggtggtcagatagtcaatctggaacagcttctggcgtagcacgggattgttgcgtacgccctccagcatggcggtcatcagctgattgatcagcgcgctggcggccgggaagctgtcaacgcgaatccgcgaccgggtctgctgatcgaaaataatatggtacagatcgtcgccatcgtgccacagacggaactcggcgcgcatacggtagtggctgaccggcgaacgaaacacttccggaaccggcgcggcaaaaggcgccatcatggtttgcaaacggacgactttttctgccagctgcgcttcgtattgttcggtaggaaggtgttcgggggtcatgatgtatcctgaataaaataagtacgcggggattgtagggaaagcgccggggatgtccagcctcgaatgccgcgggaaatataattagcagtctggacatctatatggttctgattgtagcattcgcctaccggtcctgtgagttaaaagggaacccagtggaaatctggggctgacgcgcagcggtaaggaaggtgagaaatgagcgcactcggtgcagacactgcggctagccgtgggaagtcattatttcttgaaacagcctccaagcccgaagacctgccggaatacgtcgcactgggttttatcgtcgcgagcaactgataaaacctgcggcatcctttttctgtttcggatgcttttacaatgattaaaaaagcttcgctgatgacggccttatccgtcacggcattttccggctgggcgcaggatagcaattcagatacgttggtggtgacagcaaaccgttttcaacagccggtcaataccgtgctggcgccgaccgacattgtgacgcgcgatgacatcgaccgctggcagtccaaagatttaaacgatgtcatgcgtcgtcttcccggggtcgatattgcccgcaacggcggcatggggcagagcgcttcgctgtatgttcgggggacggaggctcgtcacgtgctggtgctgatcgacggtgtgccgatggcgcgtcctgggatctccaacggcgtagatatcagtcagatccctatctcactggtccagcgggtggaatacatccgcggcccgcgctccgcggtgtacggctccggagcgatcggcggggtggtgaacatcatcaccatgaccgattcagaccgttcacaggttaacgtcggaatggggagtaacggttatcagacttatgacggcgccattaataaacgttttggcgataccgtagtgactgcagctggtgcttatcagaccacaaaaggttttaacgtccagccgaattcgccgtacagcggcgacagcgatcgtgatggctatcgtaacaagcttttcctgggcggtgtgcaacataagtttgacgataacttctctggtttcttccggggctatggttacacagccaatactgactacgatcagggctcgtatggctatgttggcggcaatgatgaaagacagaattacacgcagtcctgggacacgggtctgcgttacagctccggtatctattcctcccagctgattgctaactatcagcgcatcaaagattacaactacagcagcgacgctggccgctatgccgcgggcaccaccctggatgatatggaacagcgctatatccagtggggtaataacattgaggttgggcacggggcgattagtggcggcgtcgactggaagcaagaaaagctcacctccagtagcacaacattgtctgatgcctacaaacgcgataccaccggtctttacctgaccgggcagcagcagattgacagtgtgaccctggaagcatccggacgtgaggatcatgacgagcagttcggatggcacggtacttggcagactgcggcaggctgggagtttattgatggctaccgggctacgctctcttacggtaccggattcctggcgccgtcactgggtcagcaatatggcgcgacgcgttttgcttcgttttatgggcctggcattgcttccaacccaaacctgaagccggaagaatctaaacagtgggaagccggaattgacgggctaacggggccgctggattggcgaatctcagcatatcattatgagattcaaaacctgatcgactataaaaacaatcaatatatcaacgtgaagtcagccacgattaaaggtctggagtggacggggaacgtgacgactggcccggtggagcatcatctgacgttgcagtatgtcgatccgcgtgatgatgatactggcaaggtactctatcgccgcgcgaagcaacaagtgaagtatgaactgaccggacagatctacgatcttgactggaacgtgatgtatcagtacctcggcaagcgttacgatgatgactacgacaatgggcgcgatgtcaaaatgggcggtctgagcctctgggatgtcggtttatcgtatcccgtcacctcacacctgacagttcgtggtaaaatagccaacctgttcgataaagattacgagacagtttatggctaccaatctgcaggacgggaatacaccttgtctggcagctacaccttctgatccacgtcccaccgtgctggtgtttgattccggcgtcggtgggttgtcggtttataatgagattcggcagctgctgccgaatctgcattacatctatgctttcgataacgttgccttcccctatggcgagaagagcgaggagtttatcgttgagcgcgttgtggaaatcgtcaccgctgtccagcagcgttatcccctggcgctggcggtgatcgcctgcaataccgccagtaccgtctccctgcctgccctgcgtgaaaagttcgctttccccgtcgttggcgtggtgccggcgatcaagcccgccgcccgtttaacggcgaacggcattgttggcctgctggcgacgcgcggtaccgtaaagcgtccttatacccgtgagctgatcgaccgctttgccaatgaatgtcggattgaaatgctggggtcggcggagctggtggagctggcggaagcgaagctgcacggcgagcctgtgccgttagaagagctgcgccgtatcctgcgcccgtggctgcggatgcaggagccgccggatacggtggtgctgggctgcacccactttcctcttttacaggaggagctgcagcgcgttctgccggaaggcacacggctgatcgattccggcgcggcgattgcccgacgcaccgcctggctgttagagcatgaagcgccggatgcgaagtccagcgacgagaataaagcattctgcatggcgctgacggcagaaacagaacagcttttacccgttctgcgtcgctatggcttctcgacgctggaaaaattaccgctctaagggcgttttgcacaaaaaagagacggttgaataattttttgaaaacagggcttgtcaacgtctcagaactccctataatgcgcctccactgacacggaacaacggcaagcaagccgccgggtcagcagggttttagcggtgaagttcagcgctaaaaactgacagagaaaagcaaaataagggcttgactctgaatgaggaaaacgtattatacgggacctcgcaacggtgagctgaaagccgcgttgcaactgctctttaacaatttatcagacaatctgtgtgggcactcaaagtgacatggattcttaacgtcctcggacgaaaaatgaataccaagtctcaagagtgaacacgtaattcattacgaagtttaattctttgagcatcaaacttaaattgaagagtttgatcatggctcagattgaacgctggcggcaggcctaacacatgcaagtcgagcggtagcacagagagcttgctctcgggtgacgagcggcggacgggtgagtaatgtctgggaaactgcctgatggagggggataactactggaaacggtagctaataccgcataatgtcgcaagaccaaagtgggggaccttcgggcctcatgccatcagatgtgcccagatgggattagctagtaggtggggtaacggctcacctaggcgacgatccctagctggtctgagaggatgaccagccacactggaactgagacacggtccagactcctacgggaggcagcagtggggaatattgcacaatgggcgcaagcctgatgcagccatgccgcgtgtgtgaagaaggccttcgggttgtaaagcactttcagcggggaggaaggcggtgaggttaataacctcatcgattgacgttacccgcagaagaagcaccggctaactccgtgccagcagccgcggtaatacggagggtgcaagcgttaatcggaattactgggcgtaaagcgcacgcaggcggtctgtcaagtcggatgtgaaatccccgggctcaacctgggaactgcattcgaaactggcaggctagagtcttgtagaggggggtagaattccaggtgtagcggtgaaatgcgtagagatctggaggaataccggtggcgaaggcggccccctggacaaagactgacgctcaggtgcgaaagcgtggggagcaaacaggattagataccctggtagtccacgccgtaaacgatgtcgatttggaggttgtgcccttgaggcgtggcttccggagctaacgcgttaaatcgaccgcctggggagtacggccgcaaggttaaaactcaaatgaattgacgggggcccgcacaagcggtggagcatgtggtttaattcgatgcaacgcgaagaaccttacctggtcttgacatccacagaacttagcagagatgctttggtgccttcgggaactgtgagacaggtgctgcatggctgtcgtcagctcgtgttgtgaaatgttgggttaagtcccgcaacgagcgcaacccttatcctttgttgccagcggttaggccgggaactcaaaggagactgccagtgataaactggaggaaggtggggatgacgtcaagtcatcatggcccttacgaccagggctacacacgtgctacaatggcatatacaaagagaagcgacctcgcgagagcaagcggacctcataaagtatgtcgtagtccggattggagtctgcaactcgactccatgaagtcggaatcgctagtaatcgtagatcagaatgctacggtgaatacgttcccgggccttgtacacaccgcccgtcacaccatgggagtgggttgcaaaagaagtaggtagcttaaccttcgggagggcgcttaccactttgtgattcatgactggggtgaagtcgtaacaaggtaaccgtaggggaacctgcggttggatcacctccttaccttaaagaacctgcctttgcagtgctcacacagattgtctgatgaaaatagagcagtaagtaatctctgcaggcttgtagctcaggtggttagagcgcacccctgataagggtgaggtcggtggttcaagtccactcaggcctaccaaattcttcctgataccgcgttgtgaaacgactcgcatacctgagtatgcttcgccgttccacgccttgtctcagaaagaattaaggttaaaagagattcattcgatggggctatagctcagctgggagagcgcctgctttgcacgcaggaggtctgcggttcgatcccgcatagctccaccatctttactgcgaacacaagaaaacttcagagtgaacctgaaaaggtgcactgcgaagttttgctctttaaaaatctggatcaagctgaaaattgaaacgacacacagttaatgtgtgttcgagtctctcaaattttcgcaatcagaagtgaaacatcttcgggttgtgaggttaagcgactaagcgtacacggtggatgccctggcagtcagaggcgatgaaggacgtgctaatctgcgaaaagcgtcggtaaggtgatatgaaccgttatagccggcgatgtccgaatggggaaacccagtgcaattcgttgcactatcgttaactgaatacataggttaacgaggcgaaccgggggaactgaaacatctaagtaccccgaggaaaagaaatcaaccgagattcccccagtagcggcgagcgaacggggagcagcccagagtctgaatcagcttgtgtgttagtggaacggtctggaaagtccgacggtacagggtgatagtcccgtacaccaaaatgcacaggttgtgaactcgaagagtagggcgggacacgtggtatcctgtctgaatatggggggaccatcctccaaggctaaatactcctgactgaccgatagtgaaccagtaccgtgagggaaaggcgaaaagaaccccggcgaggggagtgaaaaagaacctgaaaccgtgtacgtacaagcagtgggagcaccttcgggtgtgactgcgtaccttttgtataatgggtcagcgacttatattctgtagcaaggttaaccgtataggggagccgcagggaaaccgagtcttaactgggcgttaagttgcagggtatagacccgaaacccggtgatctagccatgggcaggttgaaggttgggtaacactaactggaggaccgaaccgactaatgttgaaaaattagcggatgacttgtggctgggggtgaaaggccaatcaaaccgggagatagctggttctccccgaaagctatttaggtagcgcctcgtgaactcatcttcgggggtagagcactgtttcggctagggggtcatcccgacttaccaacccgatgcaaactacgaataccgaagaatgttatcacgggagacacacggcgggtgctaacgtccgtcgtgaagagggaaacaacccagaccgccagctaaggtcccaaagtcatggttaagtgggaaacgatgtgggaaggcacagacagccaggatgttggcttagaagcagccatcatttaaagaaagcgtaatagctcactggtcgagtcggcctgcgcggaagatgtaacggggctaaaccatgcaccgaagctgcggcagcgacactatgtgttgttgggtaggggagcgttctgtaagcctgcgaaggtgacctgtgagggttgctggaggtatcagaagtgcgaatgctgacataagtaacgataaagcgggtgaaaagcccgctcgccggaagaccaagggttcctgtccaacgttaatcggggcagggtgagtcgacccctaaggcgaggccgaaaggcgtagtcgatgggaaacaggttaatattcctgtacttggtgttactgcgaaggggggacggagaaggctatgttagccgggcgacggttgtcccggtttaagcatgtaggctgattgtccaggcaaatccggataatcaaggctgaggtgtgatgacgaggcactacggtgctgaagtaacaaatgccctgcttccaggaaaagcctctaagcatcaggtaacattaaatcgtaccccaaaccgacacaggtggtcaggtagagaataccaaggcgcttgagagaactcgggtgaaggaactaggcaaaatggtgccgtaacttcgggagaaggcacgctggtgtgtaggtgaagcccctgcgggtggagctgagaccagtcgaagataccagctggctgcaactgtttattaaaaacacagcactgtgcaaacacgaaagtggacgtatacggtgtgacgcctgcccggtgccggaaggttaattgatggggttatccgtaaggagaagctcttgatcgaagccccggtaaacggcggccgtaactataacggtcctaaggtagcgaaattccttgtcgggtaagttccgacctgcacgaatggcgtaatgatggccaggctgtctccacccgagactcagtgaaattgaactcgctgtgaagatgcagtgtacccgcggcaagacggaaagaccccgtgaacctttactatagcttgacactgaacattgagccttgatgtgtaggataggtgggaggctttgaagcgtggacgccagtctgcgtggagccaaccttgaaataccaccctttaatgtttgatgttctaacgttggcccctgaccggggttgcggacagtgtctggtgggtagtttgactggggcggtctcctcccaaagcgtaacggaggagcacgaaggttagctaatcctggtcggacatcaggaggttagtgcaatggcataagctagcttgactgcgagcgtgacggcgcgagcaggtgcgaaagcaggtcatagtgatccggtggttctgaatggaagggccatcgctcaacggataaaaggtactccggggataacaggctgataccgcccaagagttcatatcgacggcggtgtttggcacctcgatgtcggctcatcacatcctggggctgaagtaggtcccaagggtatggctgttcgccatttaaagtggtacgcgagctgggtttagaacgtcgtgagacagttcggtccctatctgccgtgggcgctggagaatagaggggggctgctcctagtacgagaggaccggagtggacgcatcactggtgttcgggttgtcatgccaatggcactgcccggtagctaaatgcggaagagataagtgctgaaagcatctaagcacgaaacttgccccgagatgagttctccctgagactataagtctcctgaaggaacgttaaagacgatgacgttgataggccgggtgtgtaagcgcagcgatgcgttgagctaaccggtactaatgaaccgtgaggcttaaccttacaacgccgaagatgttttggcgatttgagagaattttcagctctgatacagattaatcgatacgttggtgagacgtgttgataaaacagaatttgcctggcggcactagcgcggtggtcccacctgaccccatgccgaactcagaagtgaaacgccgtagcgccgatggtagtgtggggtctccccatgtgagagtagggaactgccaggcatcaaattgcagtaagccggggtgacaaccggtggtaataaagcgaagaaattcggtggagcggtagttcagtcggttagaatacctgcctgtcacgcagggggtcgcgggttcgagtcccgtccgttccgccacttatttaacattaagcctgctcaaatagcaggcttagtggtaagaaaattttaggggcgtagttcaattggtagagcaccggtctccaaaaccgggtgttgggagttcgagtctctccgcccctgccatttataagaatcctttgctcaggcaaaggattttttttatctctaatctccattggcaatatcctctacgaaaataccttgctgatctccgtccatggagagtagcgtttattccagaatagggtttttcaggatctcatggatctgcgcctgcttatcgctattttgtaaccagatcgcataaagtggacgggataacgtagcgctgtccatgaccgtatgtaacccatgcttctctttcgcccagcgagcaggtagccaacagcagccgttcaggcgcgataattgctgatagatcagttcagctgaagaggtagtgagcagcggaacatcatcgcttcctatcagtcccacttcgttttgctgaaaatcaggcccccattcaaggcgcaagtaattcaattcatttctgttttttgcaggcgatgcgcaatacagggcaagagtaaaattacccaacagctggctgcttaattcatccatcttcggcgattcggtggtgatcagcagatccaactggcgttcgtgaagctgtttaaccaacgactgccgctgcgcgatacgggcttcaaactggagattgtaaggtgcgctgtagagggtaccgagccagctgttaagcatacattcccacagggaggcgctggccccaatggagaattcattatgtcgcgaagagtgtgccacctccttgcgcgcagcctgccaggtattcatgagcgtttcggcataggggaggagcttttcgccggcggtcgtcaggcggatgttattacgatgacgggtgaacagattcacaccaagttgattttccagctgacgaatacgaaagctgactgctgactgtgtcaggtaaagcgcctctgctgctcgcccaaagtgacgagttctactcacttccaggaaagtcttgagcaattccgtatccacaccgttctccacaaaattatttgtcgtgatgatttaaatgttttgtttgacgctctgtcaagcgtaactaatactccgcgccataaatagctcggccaaagaatcaggagcgtgtaggatggcggaaagctttacgacgactaatcgttttttcgacaataaaaattatccacgcgggttctcccgtcacggtgatttcaccatcaaagaggcgcaactgctggaacgtcatggttatgcctttaacgaactggaactgggtaagcgcgaacctgttaccgaagatgaaaaacaatttgtctcggtgtgccgtggtgaacgtgagccggtgacggaagcagaacgcgtatggattaagtatatggcgcgtatcaagcggccgaagcgtttccatactctgtccggcggcaaaccgcagatggaaggcgctgacgattacaccgaaagcgatgactaagaaaaaagggcgtaagccctttttttacgccatcattttctgcagatggttgagcatccgatctattgcccgatagctgagcgcctcctgcaaatgacagcgttcaatctcttcaacctctgccagatcggcaatggttctcgcaacctttaacagacgctgccaggcgcgaatagaaagccccagctgcgttagcgtctgttccagccagacagcatcctcccgccttaagcgacagcagttcttcatttcacgattctcaagatgggcattgagtttattttgcctgagcatttgtcgttcacgcgccgccagcacccgctgccggaccgttgcgctcgattcttcgccctgcgagccctgactcagtattcctggcggcggcaatgggatctctaaggaaagatcgaagcggtcgaggaaggggcctgacaggcgtccaaggtagcgcaatgtctgctccggcgatgcacgattatgtttaccctgataatgtcctgtcgggcttggattcatcgctgcaataagctgaaagcgcgccggatagtcaattttggcgcgcgagcgtgatatgtggatcttgcctgactcaatgggttcgcgtagcgcatccagtacccgccgctcaaactccggcagttcatcaagaaacagcacgccattatgggccagggaaatctcaccggggaccggtatcgagccgccgcccaccatcgctgccagcgaggcgctatggtggggggcgcggaacggcctctgacgccaccgcgtctttgcggtgtggaggttgaccagactctgtatggccgcgctctccagcgcttcctgattgcttaatggcggcaggagaccggggagtcggctggctagcatggttttcccggtcccgggcgggcctatcaggagcaggttgtgaccaccggcggccacaatctccagcgctcgtttgccctgctgctggccgataacatcgagcagatcttcgtagcgttcatcccgagcaggcgcctcggcgagaggcggcgaaagcgatgtctgccccgcaagaaatgcgcaaacctcctgcagatggtcggcgaccagacaatcgctgccgccgatcaggccgacctccgccgcattgtcagaggagacgacaatgcggcggccggctttgatggcctccattgcgctggggatcgcccctggaacgcctcgtaacccacctgtaagggcgagttcgcccacaaactcatattgattcagtcgcgtcgtgttgagctgctctgaggcaacgagaagcgcgagagcgatgggcagatcgtatcgtccgccttctttgggcagatccgctggcgccaggttaatggttatcttcttcgcaggaaaagcgtagccgctgttgatcagggcgctgcggacccggtcgcgggcctctttcacggtggtttccggcagcccgaccatagttagaccaggaagaccgttgctgagatgaacctcaacggtaatcaatggcgcttcgataccgagcgccgcgcgagtatagacgatagcgagcgacataaaacctcctggacagagaagaattatggttggcatgacgtaaagcgagaatggaaaaagtgcgaatttagaactgcgtatccatacttttcgcgacacatcgttacatttagccgaaaatggacgtttgatcgcaaaacagagctatgttggcaaagagggcgccgaagagcgcggcaggggtgagaaaactgaatttttttcatttttgatttttttcatataaaacaattatttttattgaaaccgttaggctgatcagcaacgaagatataaaaaaatcttgtgctttatgtgatgtctgtggtaactctttaggtattccttcgaacaagaagccagaaagtatagaaaatgacagcccttctacgagtgattagcctggtcgtgattagcgtggtggtgattattatcccaccgtgcggggctgcacttggacgaggaaaggcttagaaatcaagccttaacgaactaagacccccgcaccgaaaggtccgggggtttttttataactgaaataacctaagcgaggagcagatgatgacttttagcataaaattctgtttctcccgatttatgacggggaactaactatgaatggcgcgcagtgggtggtacatgctttgcggacacagggagtcgacacagtttttggctatccgggtggcgcaattatgccggtttacgatgcactgtatgacggcggcgtggagcacctgctgtgccggcatgagcaaggggcagccatggcggccattggttatgcgcgagcaaccggtaaaaccggggtgtgtatcgcgacgtccggcccgggcgcgaccaatctgatcaccggcctggcggacgccctgcttgactctattcccatcgtagctatcaccggccaggtggccgcacccttcatcggcacggatgcgttccaggaagtagacgttctcggtttgtcactggcctgtactaagcacagtttccttgtgcagtctctggacgaactgccgcgggttattgccgaggctttccaggtggcaaactcaggccgtccaggtccggtgctggttgatatccctaaggatattcagatggcgcagggcgacctcgatccccatttctctaccgtcgccgatgagatggcatttccgcaggcggaagtggcgcaggctctgcagatgctggcccaatcgcagcaaccgatgctgtatgttggcggcggggtcggcatggcgcaggcggtaccggctttgcgcgaattcctggcggtgaccaggatgccggcaacctgcaccctgaaagggctgggcgtggtggatgctgattatccctattatctcggcatgctgggaatgcacggcactaaggcggccaacctggcggtacaggagtgcgatctgctgatcgccgtcggcgcgcgctttgacgatcgcgtaaccggtaagctcaataccttcgcaccgcatgccaaagtgatccacatggacatcgatccggcggagctgaacaagctgcgtcaggcgcatatcggtctgacaggcgatctgaactgcctgctgccggcgctgcagcagccgttagctatcgatggctggcgcgagcggagtgccgcactgcgtgccgagcatgcctggcgttacgatcatcccggtgaggcaatctacgcgccgctgctgctgaagcagctttccgaccgcaagccggcggacagcgtggtgaccaccgacgttggccagcaccagatgtggtcggctcagcatatgacctatacccgcccggaaaactttatcacctccagcggcttaggcaccatgggctttggcctgccggccgccgttggcgcccaggtggcgcgccctaacgatacggtgatctgtatctccggtgacggctccttcatgatgaatgtacaggagctgggcaccgttaaacgcaagcagttaccgctgaagatcgtgttactcgacaaccagcggttagggatggttcgacaatggcagcagctgtttttccaggaacgttatagcgaaaccactctgactgataaccctgatttcctcacgctggccagcgccttcggtattcctggccaacacatcacccgtaaagaccaggttgaagcggcactcgacaccatgctttcgagccaggggccatacctgcttcatgtctcaatcgacgaacttgagaatgtctggccgttggtgccgcccggcgccagtaactctgaaatgctggagaaattatcatgatgcaacatcaggtcgctttacaggcacgtttcaatccggaaaccttagagcgcgtgctgcgcgttgtccgccaccggggtttccacatctgcgcaatgaacatggaaaccgcgccggacgcacagaacataaatatcgaattgaccgttgccagcccgcggcccgtcgaattactgtttagtcaattaagcaaactggtcgacgttgcctgcgtcgagatccagcaacccacatcacaacaaatccgcgcctgagcgcaaaggaagaaaaatgacgacgaaaaaagctgattacatttggttcaatggcgagatggttccgtggggcgaagcgaaagttcatgtgatgtcccatgcgctgcactacggtacctcggtattcgaggggatccgttgctacgactcgcacaaaggcccggtggtgttccgtcatcgcgaacatatgcagcgtctgcatgattcagccaaaatttatcgtttcccggtctcccagagcgtcgacgaactgatggaagcctgccgcgaagtcattcgaaccaataatctgaccagcgcttatatccgtccgctggtgtttgttggcgatgtcggcatgggggtaaacccgcctccgggttacaacactgacgtgatcatcgcggcgttcccatggggagcctacctcggcgcagaagcgcttgagcaggggatcgatgcaatggtctcttcctggaaccgcgcggcgccgaacactatcccgacggcagcgaaagccggtggtaattatctttcctcgctgctggttggcagtgaagcgcgtcgccatggctatcaggaaggtatcgccctcgatgttaacggctatatctccgaaggcgcaggggaaaacctgtttgaagtgaaggacggtgtactgttcaccccgccgtttacctcttccgcgctgccgggcattacccgcgacgccattatcaagctggcgaaagatcttggtatcgaagtccgcgagcaggtgttgtcccgtgaatccctgtatctggcggatgaagtcttcatgtccggcactgcggcggaaatcaccccggtacgcagcgtggacggcatccaggtcggcgcaggccgtcgcggtccggtaaccaaacgcattcaggaagccttctttggcctcttcaccggtgaaacagaagataaatggggctggttggatccggtaagtaagtaattaaaaatgggacggcacgcaccgtcccatttaataaacacagatgggagtaaaaagagcatgcctaagtaccgttccgccaccaccacacatggccgcaatatggcgggcgcccgcgcgttgtggcgcgcaaccggaatgaccgatgccgatttcggcaaaccgattatcgccgtcgttaactcctttacccagtttgtccccgggcacgtgcacctgcgcgatctcggcaaactggttgccgagcagattgaagccgccggtggcgtggccaaagaattcaacaccatcgcagtggatgatgggatcgctatgggccacgggggtatgctctattcactgccatcccgcgagctgatcgccgactcggtggagtatatggttaacgcccactgcgctgatgccatggtttgtatctccaactgcgacaaaatcaccccggggatgctgatggcctccctgcgtttgaatattccggtgatctttgtttccggcggcccgatggaagccgggaagaccaagctgtcagataaaatcatcaagcttgacctggtggatgcgatgattcagggggcggatccgaaagtgtccgacgagcagagtaatcaggtggaacgctccgcctgcccgacctgcggctcctgttccgggatgttcacggcgaactccatgaactgcctgaccgaagcgctgggcctgtcgcagccgggcaacggctctctgctggcgacccacgccgatcgtaaggagctgttcctaaacgccgggaaacgtatcgtggagctgaccaaacgctattacgagcaggatgacgcttccgcgctgccgcgcaatatcgccagcaaggcggcctttgagaacgctatgacgctggatatcgccatgggcggctccaccaataccgttctgcacctgctggcggcggcgcaggaagctgaaatcgacttcaccatgagcgatatcgataagctctcccgcaaagtgccgcagctgtgtaaggtggcgccgagcacgcagaaataccatatggaagatgtgcatcgcgccggcggcgtgctgggcattctgggcgagctggaccgcgccgggctgctgaatcgcgaggtcaaaaacgtccttggcctgacgctgccgcagaccctggaacagtacgatgtgatggtgacccaggacgacgcggtgaaaaaaatgttccgcgccggcccggcgggcatccgtaccacccaggcgttctcgcaagactgccgctgggataccctggatgacgatcgcgccgaaggctgtatccgttctctggaacacgcttacagcaaggacggcggcctggcggtgctgtacggcaatttcgcagaaaacggttgtatcgtgaaaaccgccggcgtggacgacagcatcctgaaatttaccggtccggcgaaagtatatgagagccaggacgatgcggttgaggccatcctcggcggtaaagtcgtggaaggcgacgtcgtggtgatccgctacgaagggccgaaaggcgggccggggatgcaggaaatgctttaccccaccagcttcctgaagtcgatggggctgggcaaagcgtgcgcgctgatcaccgatggccgtttctccggcggcacctcagggctctctatcggccacgtctctccggaagcggcgagcggcggcaacattgcgctcattgaagatggcgacatgatcgcgattgatattccgaaccgcagcatccagctgcagctgagcgatgcggaaattgcggcgcgtcgtgaagcccaggaagcgcgtggcgaccaggcgtggacgccgaagaatcgccagcgtcaggtctcctttgctcttcgcgcctacgccagcctggcgaccagcgccgacaaaggcgcggtacgcgataaatccaagctgggtggctaatcatggcggattcacaacccttgtccggcgcccctgagggcgccgagtacctgcgagcagtgctgcgcgcgccggtttatgaagcggtgcagaaaacgccgctgcaaaaaatggataagctctcgtcgcggctggataacgttattctggtgaagcgtgaagatcgccagccggtacacagctttaagctgcgcggcgcttacgcgatgatgtccagcctgactgccgaacagaaatcccacggggtgatcaccgcttcggcgggcaaccatgcccagggcgtggcgttttccgcatcgcggctgggcgttaaggcgctgatcgtgatgccggtagcgaccgccgatatcaaagtcgatgccgttcgcggctttggcggcgaagttctgctgcacggcgccaactttgacgaagcgaaggcgagagcgattgagctggcgcaacagcagggttttacctgggtgccgccgttcgatcacccgatggtcatcgccggacagggaaccctggcgctggagctgctgcagcaggatgcccatattgaccgcgtattcgtcccggtgggcggcggcggtctggcagcgggcgtggcggtgctgatcaagcaactgatgccgcagatcaaagtgatcgcggtggaggcggaagattctgcttgcctgaaggcggcgctggacgcaggccatccggtggatctgccgcgcgtcggcttgtttgccgaaggcgtggcggtcaaacgcatcggcgatgaaacgttccgtttatgccaggagtatctggacgatatcatcaccgtcgatagtgatgctatctgtgcggcgatgaaagatctgttcgaagatgtgcgggcggtggcggagccttccggcgcgctggcgctggcggggatgaaaaagtatatcgcccagcataacatccgcggcgagcgtctggctcatattctgtccggggccaacgtcaacttccacggcctgcgctacgtgtccgagcgctgcgagctcggggaacagcgcgaagcgctgctggcggtgacgatcccggaagagaaaggtagctttttgaagttttgccagctactggggggccgctcggtgacggagttcaactaccgctttgccgatgccaaagacgcctgtatttttgtcggggtacggctgagtcgtggcctggaagagcgcaaagagatcctccagttactgaacgacggcggctacagcgtggtggatctctctgatgatgagatggctaagctgcatgtgcgctatatggtcggcggccggccgtcaaaagcgctgcaggagcggctgttcagcttcgagtttccggaatcgccgggggcgctgctgaaattcctgcatacccttggcacccactggaatatttcactgttccactaccgcagccacggcactgactatggtcgggtactggcggccttcgagttgggcgagcacgagccggactttgaaactcgtctcaatgagctgggctatgagtgccacgacgaaacgcataacccggcattccgctttttcctcgcgggttagtggttgggaagaattttccagaaagcatcaataagcggctcatgcagccgctttttttgtgcgcaaacacccagctcaaacggcgtttgctcatcgctgcgctccaggatcatcaccctgttgcgtaccggctccggactgttctccagcaccacttccggcagcagcgccacgccgcatcccagggcgaccatcgacaccatcgcttcgtgcccgccgacggtggcgtagatcgacggattgctgattttatgccgccgaaaccacagctcgatgcgccgacgtaccggcccctggtcggccatgataaagggcactgtcgaccagtcggggcgctcgacggtcacctggttgcgcaccgggcagggaagggccggggcaattaacaccacggcgaggttctccagcatcgaaaacgccaccgaccctggcagagtctccggcttaccggcaatcgccaggtcggcttcgccggtgacgaccttctccatagcgtcggcggcgtcgccggtcgagagcttgatctccaccgaggggtgcgcggcgcgaaagcggtcgaggatcggcggcagatggctataggcggcggtgacggagcagaagatatgcagctcgccggagagcgaagggccctgctgatcgatgacgtgacgaagctgctggtactgcaataaagtttgctgggcaaaggtacgtaactcttccccggcttcggtaagggtcaccgtgcgattatctcgcacgaacagcggctggccgaggtcctcttccaggcgttggatctggcgcgaaagcgtcgacgggctgacgtgcatggcccgcgcgctgcggccaaaatggcggctttccgccagatgcagaaaggttttcagatcgcgtaaatccacggcgcgtactccccggttttgtatttcataaaatgcaacgtgacgttgtgaatatatcaatttccgcaataaaattcctgtcatatagtaagttcattctcgcaaaagcgaaccgaacaataagcacgacacaacatcacggagttacagacatggctaactactttaatacactgaacctgcgccagcagctggcacagctgggcaaatgccgctttatggcgcgcgacgaattcgccgatggcgcaagctaccttcagggtaaaaaagtggtcatcgtcggctgcggcgcgcagggcctgaaccagggtctgaacatgcgtgactccggcctggatatctcctatgcgctgcgtaaagaagcgatcgctgagaagcgcgcctcctggcgtaaagcgactgaaaacggcttcaaagtcggcacttatgaagagctgatcccgcaggccgacctggtggttaacctgacgccggacaaacagcactcagacgttgtgcgctccgtacagccgctgatgaaagacggcgcagcgctgggttactcccacggcttcaacatcgtggaagtgggcgagcagatccgtaaagacatcaccgtggtgatggtggcgccgaagtgcccgggcaccgaagtgcgtgaagagtacaaacgcggtttcggcgtaccgacgcttatcgcggtacacccggaaaacgacccgaaaggcgaaggcatggcgattgccaaagcatgggctgcggcgacaggcggccaccgcgcgggcgtgctggaatcttccttcgtggcggaagtgaaatctgacctgatgggcgagcaaaccatcctttgcggcatgctgcaggcgggttctctgctgtgcttcgacaagctggtggcggaaggtaccgatccggcgtatgcagaaaaactgattcagttcggctgggaaaccatcaccgaagcgctgaagcagggcggcatcaccctgatgatggatcgcctctccaacccggcgaaactgcgcgcttatgcgctgtccgagcagctgaaagagatcatggcgccgctgttccagaaacacatggacgacattatctccggcgaattctcctccggcatgatggcggactgggcgaatgatgataagaaactgctgacctggcgtgaagagaccggcaaaaccgccttcgaaaccgcgccgcaatatgaaggcaaaatcggcgagcaggagtacttcgataaaggcgttctgatgatcgcgatggtgaaagcgggcgttgagctggccttcgaaaccatggtggcctccggcatcatcgaagagtctgcttactacgaatcactgcatgagctgccgcttatcgccaacaccatcgcccgtaagcgtctgtatgagatgaacgtggttatttccgataccgctgaatatggtaactacctgttctcttacgcttgcgtaccgctgctgaaagagttcatgaccaccctgcagaccggcgacctgggcacagcgattgccgaaggcgcggtagataacgcgcagctgcgcgatgtgaacgaagcgattcgcagccacgctatcgagcaggttggtaagaaactgcgcggttatatgactgatatgaagcgtatcgcggtagccggctaattcctcgtcgtctttcgacttgccgatgcgttggctacggtacgtacaccccagtcacatagtaatctttgttcctggggatgtacttccttgccgccttccggcaagccgaaatccatagaggcatggatttgtttagtaggcctgataagcgaagcgccatcaggcaaaaacccggagattaagatccccgggtttttttattatttccggtacagcactttgatgatgtggtagccgaactgggtatgcagcgggccggttggctccagttcagggcaggagaagaccactttatcgaaggctggtaccatctggccctggcggaactcacccagatcgccgccgcgtttgcctgacggacaaatggagtgtttctttgccagcttgccgaaatcggcgccgtttttgagctgctcgagcagatcgagcgccagtttctcttcttttaccaggatatgcagtgctgccgcggttttagccatgattgcgccttgagtgagttgggataaatcagggcgccatagtatcacgcgctagcggcgatacagcaccttgatgatgtggtagccgaatttggttttcaccgggccatagggtttgagcagcggacagctgaagacggcttgatcaaacggaccgaccatcgcgccttgctgaaactcgcctaagtcgccgccgttgcggccagacggacatttagaatagcgtttcgccagatgatcgaagctgacgccccgctccagtttggcgaggatctccagcgccagtttctcttctttgaccaggatatgcagggccgctgcgctttttgccatgacatcattctcaggatggtttgcgtggctgacactttaccatcagtcagtaaatctcggctccgctttctgctacaatccccaccccgttcgaagattgagcaagactcccatgcgtttaaaccctggccaacaacaagccgtcgaattcgtcaccggaccgtgcctggtgctggcgggcgccggttccggtaagacccgcgttattacgaataaaatcgcccacctgatccgcggctgcggctatcaggcgcgccatatcgcggccgtgacctttaccaacaaagccgcgcgcgagatgaaagagcgcgttgggcaaacgctggggcgcaaagaggcgcgtgggctgatgatttccaccttccacactttggggctggatatcattaagcgcgaatacgctgcgctgggtatgaagtctaacttttccttattcgacgataccgaccaggtggcgctgcttaaggaactgaccgaagggttgatcgaagatgacaaagtggtgcttcagcagctgatctcgacgatctccaactggaaaaacgatctaaaaaccccggcgcaggccgccgctggcgcgaaaggcgaacgggatcgtattttcgcccactgctatgggctatacgacgcgcacatgaaggcctgcaatgttctcgattttgacgatctgatcctgctgccaacgctgctgctgcagcgcaacgaggaggtgcgcgagcgctggcaaaataagatccgctacctgctggtagatgagtatcaggataccaataccagccagtatgagctggtgaaactgctggtgggtcagcgggcgcgctttaccgtggtgggcgatgacgaccagtcgatctactcctggcgcggcgcgcggccgcagaacctggtgctgctcagccaggacttcccggcgctgcaggtgatcaagcttgagcagaactaccgctcatccgggcgtattctgaaagccgccaacattttgatcgccaataaccctcacgtctttgaaaagcggctgttctccgaactgggatatggcgcagagctgaaagtgctctccgccaacaatgaagatcatgaagcggagcgcgtggccggggagctgatcgcccaccacttcattaataaaaccaattacaaagactacgcgatcctttatcgcggcaatcaccagtcgcgggtctttgaaaagatgctgatgcagaaccgcatcccgtacaaaatctccggcggcacgtcgttcttttcgcgtccggaaattaaagatctgctggcctatctgcgcgtgctgaccaacccggacgacgacagcgccttcctgcgtatcgtcaacacgccgaagcgcgagatcggcccggcgacgctgcaaaagctcggtgagtgggcgatgggccgcaacaaaggattgttcaccgccagctttgatatgggtctcagccagacgctgaccgggcgcggctatgaatccctcacccgcttcacccactggctacgcgagatccagcagctggccgaacgcgagccggtcaacgccgtgcgcgatttgattcgcgggatcgactacgaatcctggctgtatgaaacctcgcccagcccgaaagccgcggaaatgcgcatgaaaaacgtcaaccagctgtttacctggatgaccgagatgctggaaggcagcgaaatcgatgagccgatgaccctgacccaggtggtcacccgctttaccctgcgcgacatgatggagcgcggcgaatcggatgaagagctggatcaggtgcagctgatgactctccatgcgtcaaaggggctggagttcccctacgtttatctggtgggaatggaagagggattgctgccgcaccaaagcagcattgatgaagataacgtcgatgaagagcgacggttagcctacgttggcatcacccgtgcgcagaaagagctgacctttacgctctgtaaggagcgccggcaatatggcgagctggtgcgtcctgaaccgagtcgttttctgctggagctccctcaggacgaccttatctgggagcaggcacgcaaaaccattacgcctgaagagcggatgcaaaaaggccaggccaacgtcgctaatattcgggcgatgctggcaaaggcgaaaaaagcttagcgtctcaggcgataaactgctgccaggcggcggagaagggcatcaccagtattagcgagggcagcatattggcggtagggaaggcacggatcccgcacagacggaaaccggtcgccagcataatgatgccgccgcaggcggtgaagtcggcgatcatcgacggattgattaacgccatgataaaggttgccgcgaaaaacaggataacgaaaacaatcagctggggaataaagatcacggtgatgatataccccagcgtggaggcgaaaatcgcggcagtaaaaaagtcgaggatcgacttggtcagcagaatggtcgggtcgccggtcatcccttcggttaaggcgccgaagatgccggtaccgctggcgcagaacaggatcagcacggcgataaactgattcataaaatcttccgcaccgacgctggcgctggactgcgccggaaagatacgttcaatggggctgcgcagcgttgttccggctcgttcaatccatttttcaatattcaacaggccgccgataatcgtgccgacaataatagccagggcaatcggcggcaggttatgcaatttattgacaaagaatatgcccatactgattgagatcagtccggcgatcaacggtaaggtttttttgaaatgttccggaataaaacgattcagtgaagcgcccgccagcgcaccaacgagaagcgagccgctacagacaaatatacctatagccataatttattttccctaataaaaatcagggcctgaatatacaggccctgaaatatttaaattaattatttaatgttaaatacgcggctggcattaccccaggcgattttctctttcaggcctgcttcaagttctaaaggatcaaaccagtcgcaggcctgatgaatatcttcatacggataatcgacagagaacatcacgcgatcggcgcccatgacttcaatagcattattcagtgaatgggtattgaaatggccgctggtggtaacgatgaagttattctgcaggtagtgcattaacggtttttccgctttacccagaccgcagccgaaacgctgacgatagagacgatgttgagtgcgcggcagcatatgtaccagcccttcgccgaggtgacccagcaccagattgaggttaggataacgatcgaacagaccgctcatcatcagacgaatagcatgcactgccgtttcctgagcgaagccccaggcagagccgatcaggctttcgtaaccggtatagatgccacgcgccgggccttccagcggttcacgaggatgcagatagacaggcacgttcagctcgttgaccttatcccagaataccagcatggattcgtcatcaagatacaggccatgctcgctatctttaacgttggtgtagccgttgatcagcgcacctttcatgcctaactttttcacggcgcgctccagctcttccgccgcggcttccgggttctgcaatgccagggtggcgaaggcgctgaatttgtccggatttggcttaacataattctcaacgataaaatcgttggtatcgcgggcaaaagagacggctttggctttatctaaaatagactgggcgccaggtgaagtcagagaaagaattacatgatcaatatgacgctgcgccatttcttccagctgaatgctgcgatccagcaggcggcgttcaacatctttcatatattctgtgccgttacgacctgcttcaccagatgaatcccacagacggttattttcaggagtggatacgtgttcttctaaagcaatttttccgcgcatgatattttccttgcgatatgagtcagtgtggcttgatgcgaggagaataaaagctttcgcgtattaccagcaataaaccaaacgtaataggggttattaataaaaccaatacacgggcgtattttgttacttagattttaatagaagtactctgctgtgcgggatcggcaagcgtagcgatcagcgagcgtagccagatatgtccgggatcgcggtgcagccgctgatgccagacctgacggatggcgattttggcgaggggaaaaggcagcggccagctgcggcagggatagcgccgggtgatatgccgcgccacctgttccgggacgacggcaatcatatcgctttcggccaccagctcaccggtacctaaaaaacttggtaacgttagcgcaatgcgccggggcatgtggtgctcatcaagcagcttatccatatcgccatgggcagtcccctccacgcggatcgccagatgcttttcctggcgccagtcttcggcgcggagctgtgcgcgaatgcgaggatggttttccgcagccaggcagacatatgattgttcgaagagatgttgctggtagacgctttccggaagctgcgtcagatagccgatcgcgagatcgcatttcccggattcgagggcgttgagggtctgctcatccagattctgtaccgtaaaggtgatcccgtccgccgcctgctgctggagcgcaatttgcaataaaggcagcagcgtcatttggctgatatcggtcataccgatcgtaaaattacgctggctctgctggggaagaaattcaggtttgaccgctaaatcgttatcggcaagctggagaagagtcgagatggtgggggcgatcgcgtccgctcgcggcgtcgggatcatccgctgcccgacccggacaaacagcgggtcagcaaaatgatctcgtagttttttcagcaaaaggctgccggtgggctggctgatatcgagcgcgtcagccgctggggaaacattgcccaagcggtagagcgcagagaaaaagcgtagcgatttgaaatccagttcttcccgcatccgccctcctggctggatattatttcagcgtatcgccgctggcgacccgaagtatccagtggacgtagctttgccactgacactcctgatcgaccatctcccgacccagcggatgttcatccagccagtttcccggcaatatcagcgtcagttgttcgtcttgagcggtcagctgaatggcgggcaacagatcgtcgcgccgccggctggcaaacaggattgccagtcgcagcagacgacacagatgctcagccacccgcggtgggacggcattctgttgatgaagcgaagagaggtcgatagcgttagtctggttaaggagcagcgtggcaatcagcttcttctgcgccggggtaaagcccggcaggtcgaggttattgaccagataggcggcatgctgcggcgcgcgcttaaaatccacgctcagcccaatctcatgcagcgcacaggcgctaaggagtaaatcacggcttagcggatccagctcccagctgccatccaactgactgagcagatgactggcaaggccgccgacgcgctgggcctgttcggtgtcgatcataaaacgacgctgaatattacgcagcgtgcggctgcggatgtcctgctcaacggagagatgcagcatgccgtacaccaggccttcgcgtaacgcgccgcccgcgagggtcatacactgaatattcagttcgctgaagatagcgatcaggatcgccagcccgctaggaaacaccagcgcccgctcaagggttaagccttcgatctccagctcttccagacgtccgcactggatagcgcgctgtttaagctgctggagtttggcgagggtgattcgttcatccatcccctgcgccatcataatttcctgcagagcctgaacggtgccggaggcgccaacgcacactttccatccgtgatagcgcagcacatcggcgacgggcagtagtacctcgcgcgcagccgcttcggcgagatcgaaattctctttcgtcagactacggtcggcaaaatagcgttcaagccaggtgacacagcccatcgacaggctaaacagcgaggttgtttgtgcgccggtcccggtcaccagctcggtgctggcgccgccgatatcgaccaccaggcgctgatcggcgccgccggtggtgtgggcgacaccctggtaaatcaggcgcgcttcttcttcgccgctgatcacttgcactggagtgccgaggatctcctgcgctttcgccagaaactcccccgcattgacggcaagacgcagcgtggcggtggccacgacgcggatttgcgtcggcggaatatcctgcaggcgctcggcaaacaggcgtaagcactgccagccccgttccatcgcttctgcggagagggtgttgtcgctattcaggccggcggccagtcgaaccttacgcttaatgcggctcagcgtctggatgctgcccgccacctcgcgcaccaccaacatatggaaactattggagcccaaatcaatggcggcatatagcgaggtggagctcatactcttcatcgttcagaaggctccctggtcggcggggcgcttaggcccgatccacatcactgagcgggtcgccagaggaaggtcgccctggcagattctgaatgactgagcgtatggcatagatctcttaacctgaacgacgacgattgcgcggtggaccgttacggcgcgggccgttgcctgggcgcgcacgggtcagacgcagcggcttaggcaggtcggtcatcagcgcgtccgggttgtacttactgaccggaattgagtgaccaatataggtttcgatcgccggcagattcagcgcatactcttcgcaggcgaggctaatggagtgaccgctggcgccagcgcgaccggtacggccgatgcggtgaacgtaatcttcgcagtcgtccggcagatcgtagttaaagacgtgagtcacggccggaatatgtaagccacgggcggcaacatcggtcgcgaccagaatatcgaggtcgccacgggtaaattcttcgagaatgcgcagacgttttttctgcgccacgtcgccggtcagcagacctacgcgatggccgtcggcggcgagatggccccagatatcttcgcaacggtgcttggtattggcgaaaacgatggcgcgatcgggccactcttcttccagcagcgtctgcagcaggcgcattttttcttcgttggacgggtagaagagctcttctttaatacggtggcccgttttctgttccggctcgacttcaacgtactcggcgttattcatttgttcgaacgccagttcgcggacgcgataagaaagggtcgcggagaacagcatgttcaggcgctgagtggccggcggcatgcggcggaacagccagcggatatctttaataaagccgagatcgtacatgcgatcggcttcgtccagcacgacaacctgaatggcgccgaggttaatgtggttctgcttcgcgtaatcgatcagacgaccagtggtaccgatcagaatatcgacgccgctttccagcactttcaactgcttatcgtagccgtcgccgccgtaagccagacccagcttcagaccggtggcctgcgccagtggctcagcgtcggcgtggatctgtaccgccagttcacgcgtcggcgccataatcagcgcgcgcggttggttaacctggcgatcggcgatagccgggtgagagagaagataatgaaacgttgacgtcaggaacgccatcgttttaccggtaccggtttgcgcctgcccggcgacatcgcggccttccagcgtcagcggaagggcgagggcctgaatgggtgtgcaattatgaaaccctttcttttcaagggcttcaatgactgccgggtgcagggcgaagtcggaaaacttctgttctgttaaatgtgttttgctcatagtgtggtagaatatcagctaactattgcattaagaaagcgtatccggtgaaataacgtcaacctttcgttggcggtgtacgaaattattcaaggtacgtctacggtaactgaacgaatccaggatagcttagactactaagcgagtcgggagcgataaatctgcagcatgcagttcgcgttcaggcaccctggcgtcaacaggcgagtccatgatggattgcgccagttggcaggccagagaattgaggtatcctgaagaatagcgtgcataacgtagccgcagcgcgtcgttgatggctacgacaccaacacaccaggcttattcctgtggagttaaatatgagcgataaaattattcacctgactgacgacagttttgacacggacgtactcaaggctgacgggctgaccctcgtcgatttctgggcagagtggtgtggtccgtgcaaaatgatcgccccgattctggatgagatcgctgaagagtatcagggcaaactgaccgtagctaagctgaacattgaccagaacccgggcactgcgccgaaatacggcattcgcggtatcccaaccctgctgctgtttaaaaacggcgaagtggcggccactaaagttggcgcactgtccaagggtcagctgaaagagttcctcgacgctaacttggcgtaagcgaattgctgttccggcgtccagattcctattttttgcggaactctggacgcccggctggagtcgtgctaagttaatccacagacttcgttttaaacataccttgtttgaatcttgttttacccgaagcatcccgcataaatgcgcgtgaagctaataattccgggcttttcactcattccgtctagtcgtttcagttctgcgttctttcctgtgaccaggcaacgtacagacacgagatgaaggccgttaacaggcatggaagttcctgccataccattcacaacattaagttcgagatttaccccgagtttaagaacccacaccactatgaatcttaccgaattaaagaatacgccggtttctgagctgattactctcggcgaaaatatggggctggaaaacctggctcgtatgcgtaagcaggatattatttttgccatcctcaagcagcattcgaagagtggcgaagatatctttggcgacggcgtactggagatactgcaggatggatttggattcctccgctccgcagacagctcctacctcgccggccctgacgacatctacgtatcccccagccaaatccgccgtttcaacctccgcactggtgacaccatttccggtaagattcgtcctccgaaagagggtgaacgttactttgcgctgctgaaagttaacgaagttaactacgacaagccggaaaacgcgcgtaacaagatcctgttcgagaacttaacgccgctgcacgcgaactctcgcctgcgtatggagcgtggtaacggttctaccgaagacttaaccgctcgcgtactggatctggcctccccgattggccgcggccagcgtggcctcatcgtcgcgccgccgaaagccggtaaaaccatgctgctgcagaacatcgcgcagagcatcgcatacaaccacccggactgtgtcctgatggtactgctgatcgacgaacgtccggaagaagtgaccgagatgcagcgtctggtgaaaggtgaagtggttgcttccacctttgacgagccggcatcccgtcacgtgcaggttgccgagatggttattgagaaagcgaaacgtctggttgaacacaagaaagacgttatcatcctgctcgactctattacccgtctggcgcgtgcctacaacaccgtggttccggcttccggtaaagtgttgaccggtggtgtggacgccaacgccctgcaccgtccgaagcgtttctttggtgcggcacgtaacgtcgaggagggcggtagcctgaccatcatcgccacggcgctgatcgacaccggttccaaaatggacgaagttatctacgaagagtttaaaggcaccggtaacatggaactgcacctctctcgtaagattgctgaaaaacgcgtcttcccggctatcgactacaaccgttccggtacccgtaaagaagagctgcttaccactcaggaagagctgcagaaaatgtggatcctgcgcaaaattatccatccgatgggtgagattgatgcgatggaattcctcatcaataagctggcaatgaccaagacgaatgatgacttcttcgatatgatgaagcgctcgtaaggtaaaaaaagccaaaaacgccacgcctttgcgtggcgttttcattttggggtttgtatgatccagagacagagaaagcgggacgaaagttgtcgtataatggcgccggatagcaggcggagacagctttaacagactaaaatctatacaataaatttgtaatgttctgcttttccccttctggagttggggcatcatcgctatacttcccggattaactatgctgagagcacatgcgttgtgaatttactcactgctattactgaattaatcagtattttcttattcacgaccctctttatttttgtcgcgcggaaagtggcaaaaaagatcgggttagtggataaacccaactatcgcaaacggcatcaggggttgattccgttggtcggtggtatctcagtttatgcaggtatctgtttcactttcgccatcgccgattattatattcctcacgcctcgctgtatctggcctgcgcgggggtattggtgctggttggcgcgcttgacgatcgcttcgacatcagcgtgaaaattcgcgcggtcattcaggccgcgatcgccgtgattatgatgatggcagggaatctgcatctgagtagtttgggctttatttttggctcgtgggaactggtgctggggcccttcggcttcttcctgacgctgtttgccgtctgggccgctatcaatgcgttcaacatggtcgatggtatcgacggcctgctcggcggactgtcatcggtctcttttgcggcgaccgggattatcctttggtttgatggtcagtacagcctggcgatgtggtgtttcgcgatgatcgccgccattctaccctatattcttctcaatcttggcgccctcggccgccgctataaagtctttatgggtgacgccggcagcacgatgattggcttcaccatcatctggatcctgctggaaaccacgcaaggtaaaacgcatcccattagcccggtgaccgcgctgtggattatcgctatcccgctgatggacatggtggcgattatgtatcgccgcctgcgcaaaggcatgagtcctttctcaccggaccgtcagcatattcatcatttgatcatgcgcgccgggtttacttcccgccaggcgtttgtcctgattaccctggccgccgccctgctggcgctggttggcgtcgtggcggaatacacccgcattgtgccggaatgggtgatgttaattctctttttggtagccttctttctttatggctactgtattaagcgcgcctggaaagtggcgcgcctggttaagcgcatcagacgcagaattcggcgacacagcggcaataatccgaaactaaccaagtagagctggggatgtgatgactcaaccattaccgggagcacaagcagtgaacgttgagaacgagctggatattcgcgggctgtttcgcgctttatgggcaggaaaaggctggatagtcggcggcgccgtactcttcgccgccatcgtgctggtgtacaccttctttgctcgccaggagtggagcgccacggcgatcaccgatcggcctactgtcaatatgttggggggatactattcccaacagcagttcttacgcaatctggacattaaagccgacctcgcctcggtcgaccagccttccgccatggatgaagcgtataaagagttcatcatgcagctggcctcctgggatacccggcgcgatttctggctgcaaacggactactacaagcagcgtcagtcgggtaatgcccgcgctgatgcggcgatgctggatgacctgattaacaatatccagtttatgccaggcgatgcggccaagagcattaacgacagcgtcaaactgaccgccgagaccgggcaggatgccaataatctgttgcgtcagtatgtggccttcgccagccagcgggcggcaggccatcttaacgacgaacttaaaggcgcctgggcggcgcggacggtgcagatgaaggcgcaggtgaagcgccaggaagaggtggccgaggccatcttcaaccgccggacgcacagcgtggagcaggcgctgaaggtggctcagcagcacaatatttcacgtagcgaaacggatgttcctgccgatcagttgccggattcagagctatttttattgggcaggccgatgctgcaggccaggctggaaaacctgcaggccgttgggccggaatatgacctcgattacgaccagaaccgcgccatgctgagcacgttgaacgtcggtccaacgttagatccgcgttttcagacttaccggtatttgcggacgccagaagaacctgtaaaacgcgatagcccgcgccgtgtatttctgatggtgatgtgggggattgtgggtgcgctcatcggcgcaggcgtggcgttatcgcgtcgtcgtgtcctgtgattgcggcctgtggtgaagggcagatgaccttcatcgcctaatcgaagagaatcgatgtgaaagtactaactgtatttggcacgaggccggaagccatcaagatggcgcctctggtccatgcgctggcaaaggatcctcattttgaggcgaaagtatgcgtgaccgcgcagcatcgggagatgctcgatcaggtgttgaaacttttctctattgtcccggactacgatctcaacatcatgaagccggggcaggggctgaccgagatcacctgtcgcatccttgaagggctgaagccggtgctggagtcgtttaaacccgacgtggtgctggtgcatggcgataccaccaccaccatggcggcgagcctggcggcgttttaccagcggataccggtgggtcacgtagaggccggcctgcgcaccggcgatttaagttcgccgtggccggaagaaggcaaccgtacgttgaccggccatctggcgacataccatttcgcccccacggaaacctcgcggcagaacctgctgcgggaaaatattgccgacagtcggatcacggttaccgggaatacggtcattgacgccctgttctgggtgcgggatcgggtgctgggtgatgaagcgctacgggagaccctgctgcagcgctatcctttcatcagccacggtaaaaagatgattctggttaccggccaccggcgggaaagctttgggctcggttttgaacagatctgccaggcgctggccgagatagcccatacccaccctgaggtgcagattgtctatccggttcacctgaatcctaatgtcagcgagccggtgaatcgtattcttggtcatattgacaatgtgatgttgattgaaccgcaggattacctgccgttcgtctggctgatggatcgcgcctggctgatcctgaccgattccggcggcattcaggaagaggccccctcgctgggtaagccggtgctggtcatgcgcgatatgaccgaacgtccggaagcggtggccgccggcaccgtgtgtctggtgggcaccgacagccagcgcatcgtcgcggaagtgacgcgactgctggaggatgatgctgcataccaggcgatgagccgcgcgcataatccctatggcgatggcgaagcatgtcgtcgcattttgtctgcacttaaaaataatcaggtaacgctatgagtttttctaccatttcagtgattggccttggctatatcgggctgccaaccgctgccgcgttcgcctcccggcagaagcgggtggtcggcgttgatgttaatcaacatgccgtggagaccattaaccgtggagagattcatatcgtggagccagatctggcgagcgtggtgaagaccgcggtcgagcaggggtatttaagcgccaccaccactccggtggaggcggatgcttacctgattgccgtgccgacgccgtttaaagatcgccacgagccggatatggtgtttgtcgagtcggccgccaaatccattgcgccgacgttaaagaaagggtcgctggtgatcctcgagtccacttcgccggtcgggtcgaccgaacagatggccgagtggctggcggagatgcgcccggatcttagcttcccccagcaggtgggtgaagcggcggacgtgaatatcgcctactgcccggagcgggtattgcccggtcaggtgatggtcgagctgattaaaaacgaccgcgttatcggcggcatgtcgccggtctgctccgctcgcgccagcgagctgtataaaatcttccttgaaggcgaatgcgtgatgaccaactcgcgcaccgccgagatgtgcaagctgacggaaaacagcttccgcgacgtcaacatcgcttttgccaacgagctgtcgctgatttgcgccgaccaggggattaacgtctgggagctgatccgcctggcgaaccgccatccgcgcgtcaatatcctgcagccgggcccgggtgttggcggccactgtatcgccgtcgacccatggtttatcgtggcgcaaaacccgcagcaggcgcgtctgatccgcaccgctcgcgaggtcaacgaccacaagccggaatgggttatcgaacaggtgaaagcgcaggtggcggactgcctgaatgccaccaacaagcgggccagcgaactgacgatcgcctgttttggcctcgcttttaaaccgaatattgacgacctgcgcgaaagtccggcgatggaaattgccgcgcagattgcccgctggcacagcggcacgacccaggtggttgagcccaacattcacgcgctgccgaagaaactcgatggactgtgtacgctggcgacccttgaggcggcgctggccagcgccgatgtgctggtgatgttggtcgatcataaccaatttaaagccgttagcggcgatagcgtcacccaggcgtttatcgtcgacaccaaaggagtgtggcggtgagaaccattctggtcaccggcggcgcgggcttcattggttcggcggtagtgcgggagattatccagcacaccgccgatcgcgtggtggtggtggataaactgacctacgccggcaatttaatgtcgctggcgccggtggcgcaggatgcgcgtttcgcctttgaacaggtggatatctgcgaccgcgccgagctggatcgcatttttcgtcagcatcaaccggatacggtgatgcacctggcggcggaaagccatgtcgatcgttcgattgacggcccggcggcgtttatcgagaccaatatcgtgggcacctatacgctgctggaggcggcccgtagctggtggaataccctggctatggcgcaaaaatcggcgtttcgcttccatcacatctccaccgatgaagtgtatggcgatctgcacggcagcgatgatttctttaccgagaccacgccctatgcgccaagcagcccctattcggcttcgaaagccagcagcgaccacctggtgcgcgcctggctgcgaacctatggcctgccgacgcttatcaccaactgctcaaataactacggcccgtatcactttcccgagaagctgatcccgctgacgatccttaacgcgctggcgggcaagccgctgccggtgtatggcaatggacaacagatccgcgactggctgtacgtggaagatcacgccagagcgctgtatctggtggcgacccgcggcgaaccgggcgaaacttacaatatcggcggtcataacgaacgtaaaaatatcgaggtggtggaaaccatttgtcagctgctggaagagctggcgccggataagccgcagggcgtggcgcactatcgcgatctgatcgccttcgttgccgatcgtccgggccacgatctgcgctatgccattgatgcctcgaagattgcccgcgagctgggctggacgccggcagagactttcacctccggtatgcgtaagaccgtggcgtggtatctggcgaacgaggcctggtggcgtcaggttcaggacggaagctatcagggcgagcgtcttgggctgcaaagctaatcatctctggggggaatgatgaaaggtattattctggcaggcggttccggaacgcggctacatcccatcacccgcggcgtatcgaagcagctgttgccgatctacgataagccgatgatctactacccgctgtcggtattaatgctggccgggatccgtgagatcctgattatcaccacgccggacgacctacgtgatttccagcgcctgctcggcgatggctcagagtttggcattgcgctgcactatgccgtacagccgacgccggatggtttagcccaggcgtttatcatcggagaagcctttcttaacggcgaaccggcgtgtctggtgttaggcgacaatatcttcttcggccaaagctttagcccgaagctgcgcagcgtcgctgcccgcacggaaggggcgacgatttttggctatcaggtgatggatcctgagcgctttggcgtggtggagtttgatgataacttccgtgcgctatcgctggaagagaagccgaagcagccgaagtcgaactgggcggtcaccggtctctatttctacgatggcaaggtgacggagtatgccaaacgggtcaaaccatccgagcgcggcgagctggaaatcacctccatcaaccagatgtatctggaggatggcgcattgaccgtcgaactgcttggacgcggctttgcctggctggacaccggcacccacgatagcctgatcgaggccagcatgttcgtgcagaccgtcgagaagcgccagggctttaaaatcgcctgtctggaagagatcggctggcgtaacggctggctggacgacgacggcgtcaaacgtgcggcgaagcggctggaaaaaaccggctacggccaatatctgctggatctgctccgtgcccgtccgcgccagtattgaccccctggagtgggagaaccgcttctttgccgtgaacagcgcgatcgtgcgctttgacgagcacgcgccgcggctgacgcctgaggcgctggcggggtggtcgcgagtgcaggcgaagatcgccgccagcgacaccgtccggctggacgcgctgcagcggctgggttttcagctggtggaaggtgaggtcgatctggcgctgccggtgggcagccctgcagatgccggcgcagacgtcgccgtggaagcggatattgcgccgctgcgcgagcaggcggcgcaggcatttgccatgagccgctttcgcgcgccctggtacgctgccgacgccagcggccgcttctatgcccagtggattgaaaatgcggtgcgcggcaccttcgatcatcagtgcctgatttaccgccatcctgagggcgatattcgcgcctttgtctccctgcggcagatcactgcgaccgaagcgcgtatcggcctgctggccggacgcggcgccggggcgcagttgatgcaggcggcgcggtactgggccgcctcgcgcggactttctacactgcgggtggcgacccagatgggcaacaccgccgcgcttaaacgttatattctcagcggtgctaacgtggaaagcaccgcctactggctatacaggtgacccccatgatcccatttaacgcgccgccggtggttggaaccgagcttgattacatgcagtctgcgatgaacagcggcaagctgtgcggcgacggcggctttacgcgccgctgccagcagtggatggagcagcgatttggcacggcaaaagcgctactgaccccttcctgcacggcttcgctggagatggccgcgctgctgctggatatccagccgggcgacgaagtgattatgcccagctatacctttgtctccaccgccaacgcctttgtgctgcgcggggcgaaaatcgtcttcgttgatatccgtcgcgatacgatgaatatcgacgaaacgctcatcgaagccgccatcaccgataaaacccgggcgattgtcccggtgcattatgccggcgtagcctgcgagatggacaccatcatggccatcgccgacaaatacaacctgtttgtggtggaagacgccgcacagggggtgatgtccacctacaaggggcgcgcgctgggcaccatcggccatatcggctgcttcagcttccatgaaaccaaaaactacaccgccggcggtgagggcggggcgacgctgatcaacgatcgcacgctggtggaacgcgcggagattattcgcgaaaaaggcaccaaccgcagccagttctttcgcggcctggtggataaatatacctggcgggacattggctccagctatctgatgtccgacctgcaggccgcctatctgtgggcgcagctggaagcggcggagcgcatcaaccagcagcgcctggccctgtggcagaactactatgatgcgctgctgccgctggcgcgcgccgggcgtatcgaactgccgacggttccggccgactgcgggcaaaacgcgcacatgttctacattaagctgcgtgatatcgaggatcgcagcagactgatcgcctggctgaaagaggcggagatcctcgcggtattccattacattcccctgcacagctgcccggcaggcgaacagttcggcgaattccgcggtgaagaccgctacaccactcaggagagcgagcgtctggtacgcctgccgctgttttacaatctgtctgtggtgaaccagcggacggtgattaactcgctgctgagctacttctcctgatatgtcgttagcaaaagcctcactgtggacggcggcatcgacgctggtcaaaatcggcgccggtctgctggtcgtcaagctgctggccgtctcgtttgggccggcgggcgttggccaggccggtaacttccggcaactggtcaccgtactcggcgtgctggccggggccgggatatttaatggcgtcacgaagctggtggcgcagcatcacgacgatcccccgcgcctgaagcaggtggtgggcacctcgtcggcgatggtgcttggcttttccaccctgctggcgctggtatttttactggcggcggcgccgataagccaggggctgttcggccatacgcactatcaggggctggtacgcctggtggcgctggtgcagatggggatcgcctgggcgaatttcctgctggcgctgatgaaaggctttcgcgatgcggcgggtaacgccttctcgctgattgccgggagcctgatcggcgtggcggcttactatgcttgctacgtgttgggaggctatcagggcgcgctgctggggctggcgttagttccagcgctggtggtggtcccggcgggtattatgctctggcggcggggtaatatcccgctgagcgccctgcgtccgcgctgggataacggcctggcgggtcagctatcgaaatttaccctgatggcgctgataacctcagtgaccctgccggtagcctatgtgatgatgcgtaatctgctggcggcacattatggctgggaggcggtcgggatctggcagggggtgagcagcatctccgatgcctacctgcagtttattaccgcctcgtttagcgtctatctgctgccgacgctgtcgcggctgagcgccaaaacggatatcacccgcgagatagtcaagtcgctgaaattcgtcctgccggcagtagcggcggcgagcctgacggtctggctgctgcgcgattttgccatctggctgctgttttccgatcgctttaccgcgatgcgtgacctgttcgcctggcagctggtgggcgacgttttaaaagtaggcgcctacgtctatggctatctggtgatcgccaaagcgtcgctgcgtttttatattctgacggaaatcagccagttcgcactgctgaccgcattctcacactggcttataccggcgcacggcgcggttggcgcggcgcaggcatatatggccacttatattgtttatttcgccctttgtagtggcgtgtttttactctggcgtaaacgggcatgacagcactgatacatgtactgggatcggatatcccgcatcataaccagaccgtactgcggttctttaacgacgaactggccgccgacccgcaggccaggagatttatgatcgtcggtgatgaggccagcgtgcgtgatgggtatccggcgctggacatcacctgttatccggggaaaaaggcgctggcgcaggcagtgattgctaccgcgaaagccaaccgccagcagcgctttttcttccacggccagttcaataccgggctgtggctggcgctgttgagcggtggcatccgcccgtcgcagtttaactggcatatctggggggcggatctgtatgaaaattctgccagcctgaagtttcgcctgttctatccgctgcgccgtatggcgcaggggcgggtagggcgcgttttcgccacccgcggcgatctcagctggttcgctaaccgccatccgcgcgtcccgggcgagctgctctacttcccgacccgtatggatccggcgctgaataccctggccgataacgatccgcgcggtgataccctgactattctggtgggcaactccggggatcgcagcaatgaacatattgccgcgctgaaggcaatccatcagcagtttggcgatacggtaaacgtcatcgtgccgatgggctatccagcgaaaaacgacgcctatatcaatgaggttcgcgaggcgggggcggcgctgtttagcggtgagcatctgcagatcctcagcgagaagctggagtttcatgattatctggcgctgctgcgccgctgcgatctgggctattttctgtttgcccgccagcaggggatcggcaccctgtgtctgctgattcaggcgggcatcccctgcgtgctcaatcgggaaaacccgttctggcaggatatggccgagcagcatgtgccggtgctgttcaccagcgacgcgctggacgtcagcgtggtgcgcgaagcgcagcgtcagctggcgagcgtggataaatccgctatcgccttcttccggccgaactatctgacgggctggcagcgggcgctacggttagcggcggaggggcaggcatgacgttaatgcaatttagcgggctgctggtggtctggctgctgtcgacgctgttcatcgccaccgccacctggtttgagttccgtcgggtacgctttaacttcaacgtttttttctcgttgctgtttctgctgacctttttcttcggcttcccgctgaccagtattctggtgttccgctttgacgtcagcgtggcgccgccggagattttgctgcagacgctgctgatcgcggtgtgcttctacgcagtctactacgtgacctataaaacgcggctgcgttcggcatcgcgtgaggttgcgcatcgcccgctgtttaccatgaaccgggtggaaacccatctggcgtggggcattttgatggggctggcgctgctgtgcgtcggcatcttcttcgcccacaacggtttcctgctgtttaagctcaactcctacagccagattttctctgctgaagtgtccggcgtggcgttgaagcgcttcttttacttctttattccggcgatgctggtggtctattttctgcgccaggattataaggcgtggatcttcttcctcgtcagcacggtggcctttggtttgctgacctacgccatcgtcggcgggacgcgcgccaatattatcatcgccttcgccatctttctgttcatcggtattattcgcggctggatcagcctgtggatgctggctgcggcgggtgtgctgggtattgtcggcatgttctggctggcgctgaagcgctacgggatgaacgtcagcggcgacgaagcgttttatacctttctgtatctcacgcgcgacaccttctcaccgtgggagaacctggcgctgctgctgcagaactacgacaagatcgatttccaggggctggcgccgatgatccgcgatttctacgtctttatccccagctggctgtggcacggtcgcccgacgatggtgctcaataccgccaactactttacctgggaagtattaaacaaccattcggggctggcgatttcgccgacgctgattggctcgctggtggtgatgggcggcgtctggttcgtaccgctgggcgccgtggcggtagggttgattattaaatggttcgactggctgtatgagctgggcaaccgggagagcaatcgctataaagcggctatcctgcacagtttctgtttcggcgctatcttcaacatgatagtgctggcgcgcgaggggctggattcgttcggctcccgcgtggtgtttttcctcgtgatctttggtatctgcttgctggcggcgaaactgctgtactggttcctggatagcgtgggactgattcataagcgcgtaaaaccgctttcgcaaccgcaagtctgagaaggatggacatgactgggaccatttccgcgccgttgtacctgttaagagggctgcagctcataggctggcgcgatatgccgcacgctctggattatttgtttgccgacggcgcgctccgggaggggacgctggtggccattaatgctgagaaaatgctggccgtagaagataacccggaggtacgggcgctgattgaggcggcggagtttaaatatgccgatggcatcagcgtggtgcgttcgctgcgcaaaaaatacccgcaggcccaggtatcccgcgtcgccggggccgatctctgggaagcgttaatgcagcgcgctggcgctgaagggacaccggtgtttttggttggtggtaaacctgaggtcctggcgcagacagaatccaggctgcgtcagcgctggcaggtgaacatcgtcggcagccaggacggttatttcacccctgagcaacgccaggcattgttcgaacgcattcgcgacagcggggcgaaaatcgtcaccgtcgcgatggggtcgccgcgccaggagatctttatgcgcgactgccggcgcctgtatccgcacgcgctgtatatgggcgtcggcggcacttacgatgtttttaccgggcacgtccatcgggcgccgaagttctggcaggatctggggctggagtggttctatcgcctgcttttgcagccgagccgcatcaagagacagttccgtctgctgcgctatttacgttggcattattccggtaagctctgatattccactgtaaccaggcgagtttgcatacatattctgtgtaatctcttcactcgcctgatactttatttgccatttccgcaaaattaattaaccattcgcaggcttcatacgcgccggggagacctgcgcgtcggcaaggctatggtttcagttaataacaataaccgggagtacccggaatacggcaaacacaagaggatatatgactgagaaaaaagcggagctccagcgtggactggaggcccggcatattgaactgatcgcccttggcgggacgattggcgtggggttgtttatgggggcggccagtaccttgaaatgggctgggccttccgtgctgctggcgtatattatcgctggcctgttcgtctttttcattatgcgctcaatgggcgaaatgctgttccttgagcctgtcactggctccttcgcggtgtatgcgcatcgctatatgagccccttcttcggctatctgaccgcgtggtcctactggtttatgtggatggcggtggggatctcggagattaccgccatcggggtctatgtgcagttctggttcccggagatggcgcagtggatcccggcgttaattgctgtgggactggtggcgctggcgaaccttgcggcggtccggctatacggtgaaatcgagttctggttcgccatgataaaagtgaccaccattatcgtgatgatcgtcgtgggtctgggcgtcattttcttcggctttggcaacggcggccactccatcggttttggtaatctcaccgaacatggtggtttctttgctggcggctggaagggcttcctgacggcgctgtgtatcgtggtcgcgtcctatcagggggtggagctcatcggcattaccgcaggtgaagcgaaaaacccgcaggtgacgctgcgcagcgcggtgggcaaagtgctgtggcggatcctgattttctacgtcggcgcgatttttgttatcgtcactatcttcccgtgggatcaaatcggctccaacggcagcccgttcgtactgacgtttgccaagatcggtattaccgcggcggcgggaattatcaacttcgtggtgctgacggcagcgctttccggctgcaacagcggaatgtacagctgcggacgtatgctgtacgccctggcgaagaaccgtcagctgccggcggcgatcggtaaggtatcgcgcaacggcgttccgtccgtcggtgtggcgctgtcgattctgatcctgctggtgggctcctgcctgaattacattattcctaatccgcagcgggtgttcgtctatgtctatagcgccagcgtcctgccggggatggtgccctggtttgtgatcctgattagtcagctgcgtttccgtcgcgtgcatcaggcggcgattgccagccatccgttccgttcgctgctgtttccgtgggccaactatttcacgatggccttcctgatctgcgtgctggtcgggatgggactgaatgatgaaacccggatgtcgctcttcgtcggcattatttttctggccgccgtcaccctgatttataaggtgtttggcctcggaagacaggggtaagtcaataatacggctgaataaccgtcaaaacgaacaaagcatgagcaaacgataattttctttaaaaaggcactagacagcggggtaggaagtccgtattatccgaccccgcaacggcgctaagcgcccgtagctcagctggatagagcgctgccctccggaggcagaggtctcaggttcgaatcctgtcgggcgcaccattaacccggtgctggagctgcggtggttttaataccgcgtaaaaggtttgcagtggtggctatagctcagttggtagagccctggattgtgattccagttgtcgtgggttcgaatcccattagccaccccattatttgatagagttgtgaatttgcgaaggtggcggaattggtagacgcgctagcttcaggtgttagtgttcttacggacgtgggggttcaagtcccccccctcgcaccacgactttaacgaattgaactaaaaattcaaaaagcagtatttcggcgagtagcgcagcttggtagcgcaactggtttgggaccagtgggtcggaggttcgaatcctctctcgccgaccaattttgaaccccgcttcggcggggttttttgttttctgctgccgtccgccatctcttatttctctgatcttgctgataaaaaatcttctctttgcttaagaatacgcgtcaggaaaactctcaattcatcactgtggtagatgcaatttccccggatcctgtgcgataataaccgggtagatgctcattccatctcttatgttcgccttcgtgcctcataaactccggaatgatgcagagccgttcttacggtgcttatcgtccactgacagatgtcgcatttatgcctcatcaaacaccatggacattacgttgagtgaagcacccaatttgttgtcaaacagacctgttttaacgcctgccctgatttcagcgcaggcgtttttttctttcagggatccgtcaatgtgaaggcgggggagaagggctatcgccccgcaggaggcgatagccatgccaggttatggctgaggattattctgcagcgtcagcagcagtccatcgcggcgcatagcggcggcttcttccggctgatgcaggcggtccagggcatccgccagccaggcgtaatcaaaggcatccggacgctgcttaagcgcggcgcggaaggcgatgctggcctcctgccattcgccgtgccgcatcagcgactggcccagggtgctccacagcagcggacggtcgccaacggctttgatctgctggcgcagcactttctcaagctgttccgggttattggtcttcagacgcgggatcggcatcaccagacggtcatcatactgtttcttcagaccatcaatgataatttgctgcgcggtatcgtgatcgtcgctctcgatgaggcgctcggccatcgccacctgcagcggcaccatcgcccgcgttttacggctctggttgcgccaccattcgcgtagtccttcgctgccgccatcggccagcgctttatccatcaggccaacccaggccagctgttccagcgccgcgcggtgcgcttcatcgccgacgttagctttcgccatcgacggaatgatgtccagcagcgactgccaggcgccggtgcgggtgtatgcctgttcggcgaggcgcagcacttccggatgacgcggggtaatttccagcagcttatcgatgccatggcgcgcagcgtgattttcattacgcgccagctgcaggcgaacgcgagtgatttccaccgggatcaggtcatcgcccgccagctcggtggcgcgctccagatgctggttggcccgcgcttcatcgccgcgctgctgggccgcttccgccgccagcagatagttcaccaccggctgttcggcgtgatcggcatttttcgccatcagcttctcaacctgctggtaatcaccttccgccagcttaagcagcgcctgctcggtttgcttacgcgcgcgacggcgtttacggccgacaaaccagccgcgcgtatgcgccccggtgcggaaaatgcggcgcagcagccattcgatggcgaacagcaccaccatggcgaggatcaggatgatcaccagcccggtcacgctggtctcgatattgtaattatcggtctggatcaggacgtagccctgatgcccggcgatcatcgggccaagcacgatcccggcgatcaacagtgcgaagagtaaaagaattttcagcatgcgttactctccttgcggcgcagcgggggcggccggcgcagcaggtgcgggcgaaggcgcgccgcccgcggtaacggcaggctgcgccatcaggttgcgcactcgggtctgcatcagtttttccagcaacgcctgactctgcagcgtttccggcaccgtcatggtaatgctttgctgactgagcttatccacctcgtcgaggaaggctttggtggtggcgtcatcggtatcataataggcgcgtacccaggtcgagacgttatccagcgactgtttccaggtctcttcctgatggcgcggaactgcctgcgcggcgaccagcaggcgagagcgaatattttcccgcagatagatatcctgattcggcgccagcagcgggaccgccgtttcatcgcggcggcgcacggtgataaagctgtccataaagttctgccagcttttctgcaggttgacgcgccattcgctgatagagctggaaagctcatcgctatcagcgtccatcggcgaatcgtcatcgttattatcggccagccgcaggttatcgatttggttcgccagctgattaaccttgaggatcatgccgtcatagtccacctggcttaccgcggagagggtggcgatgtcgtcggtgatcgcccggcgggcgccgatgaggcttgggtcgttcatgtcggcgaggctggcgtcagcgcttttcagcagcgcggcggcggtggtgacatcctgatcgctccacagcttacgtcccgccagcttgacgaggaagtcggcctgggccagcagccaggttttggcatcgctaccggaaatcaccgccactttttgctgcagctcatccaactgtttggccagcgtctcctgctgatgtttggcttcgtttagctggtcggcctgctgtttgataacaccttccagtttacttttttgattttcctgcgctttttgcagcgccgcgacctggcttgctaattcagaggtagttgcgttttgccgcgtggcctgttgtttgttcaggccatacaggccgatgccggcggctatcgcaatggcgatagcgatcgcgctgagcgccaggctggttttattgcctgccttcttcttctcagtgttctctggctgtggtgtggtctccacggcctccctggtctcttcaaccacggcggattgattttgttgttccgtcattatggcttccaatgttgagagttattgtaatgcgcgtagcagcgcatcgttgtcggcgctatcggcaacctgaatctcctgccagcccagttcccgggcctgaagggccagacgttcgctgacaacgacaacgcggcagtgcaggagccactgttcgcgataccattgcggtattaacgaccatagctgctgcagcatctcgccgctggtgaccaccagcgtggtgactccgcgagattgccagcgcatcgcttcttctgcgccatcgtaatgttttgcactacgttgataacattcacaaaatgtgaccctggcgccgcgctcggtcagcgttgcgcctaagagttcccgcccgccattgccgcgtaggatcagcgcatttttcccggcaatgttttgtaattcaggtaattgtagcaagacttcgctaatttcccgatctaacgggtaatggatatgctgcccactgaccgtatgcagggccagcgccgtcgtgcggccaatggcaaaatagcgcggagaagtgggccagggcaggccctgctgctgcagacgggcatgggcgaattccaccgcatgctgggatagcgcaaatagcagatcgtcgggccccagtcgggcaagcgcatcgcccagcgcgggaagctccctgccaggcgtaaattctatcagcggaaagctccaggccacgcgtcccatggcccgcagacggctgaccagcgcttctccttgcggtagtggacgagtgaccaggatgctcatcgcggggcttctccatcataaaccgccgcgagaatctcgcgggcgccattatccagaagctcttccgccagcgagatgccgagggcttccgcttgttccgctggcccgcgtcgttcgccgcgcaccagctgtgaaccatccggagcgccaaccagcgcccgcagccacagttccccgtccttcagttccgcatagctgccgatcggcacctggcagccgccttcgaggcgggtgttcatcgcccgctcggcgcgcacgcgcaccgccgtttccgtatggttgagaggcgctaacagcccccgggtccatgcatcatcaagacggcattcgatgccgaccgcgccctggccgaccgccggcagagattgctcaggcgacagcggctggcgaatacgcgcttccagctgcaggcgcttcaggccggcggcggcgaggatgatggcgtcgtactcgccgttatccagcttactcagccgggtaccgacgttaccgcgcagagagcggatcgccaggtccggacgggtggcggccagctggcactgacggcgtaaacttgacgtgccaacgacgctgccggccggcagttcgtcaatcgaggcatagcgattggagacaaacgcgtcgcgcggatcgtcgcgctcgcagatagtcaccagccccaggccctccgggaattccaccggcacatctttcatcgaatggacggcgatatcggcgcgcccttcgagcatggcgagctctaactctttcacaaataagccttttccccccacctttgccagcggagtatcaaggatgacatccccgcgcgtgaccatcggcaccagctcgaccttcagtccgggatgcgcttgttccaggcgcgctttaacatactgcgcctgccatagcgcaagcgggctttgccgtgtggcaattttcaaaactttgtctaacatgcttgttaccgtcattatcgaccactatccatcctaacattgttgtcttacggatgttagttttcacggtttatgtgggaggtggctccggcccactcttttttaacctttcatgcgcgtggcggttgccggaggcgtagtgaggaatttacaggtaataaacggtgctacacttgtatgtagcgcatctttctttacggtcaatgagcaaggtgttaaattgatcacgttttaaaccatttgtcagtccgctgctcatcacaaccacaccgacgacgaatggtgacggtttttgttgaaatactgaaatcctccgtactattgtacctcgggtttttgaacatcaggcgatatgtcttgtacctctatattgagacactgaaacagagactggatgccatcaaccaattgcgcgtggatcgcgcgcttgctgccatgggacccgctttccagcaggtttacagtctactgccaacgttattacattatcatcacccgctgatgccgggttaccttgacggtaacgttccccgtggcatttgcctctacacgcctgatgaaacccaacgccactatcttgaagaactggaactgcatcgcggtatgcagactcaggagccgccgaaaggcgagctgccgatcaccggcgtctactcgatgggcagtacttcctccgtcggccagagctgctcttccgatcttgatatctgggtatgtcaccaggcctggctggatagcgaagagcgtcagctgctgcagcgaaaatgcagcctgcttgagagctgggctgcctcgctcggcgtggaagtcagcttcttcctgatcgacgaaaaccgtttccgtcataacgaaagcggtagcctcggcggcgaagactgcggttcgacccagcatatcctgttgcttgatgagttctaccgcaccgctgtgcgcctcgccggcaagcgtattctgtggaatatggtgccgtgcgatgaagaagagcattacgatgattacgtgatggggctgtatgcccagggcgtgctgacgcctaacgaatggctcgatctcggcggcctcagttcgctgtcggcggaagagtacttcggcgccagcctgtggcagctgtataaaagtatcgactccccctataaagcggtgctgaaaacgctgctgctggaagcctactcctgggaataccccaataaccgcctgttagcgaaagatatcaaacagcgtctgcacgacggggagattgtctccttcggcctcgacccgtactgcatgatgctggagcgcgtgaccacctatctgcaggccatcgaagatgaaacccgcctcgatctggtgcgccgctgcttctacctgaaagtttgtgaaaaactcagccgcgaacgcgcctgcgtcggctggcgtcgcgaagtcgtcagccagttggtgaatgcctggggctgggacgaaaagcgtctgatgatgctcgacaaccgcgccaactggaaaatcgatgaagtgcgcaaggcgcacaacgaactgctcgacgccatgatgcagagctatcgtaatctgatccgcttcgcgcggcgcaataaccttagcgtctccgccagcccgcaggatattggcgtgctgacccgtaagctgtatgcggcctttgaagcgctgccggggaaagtgacgctggtaaacccgcaaatttcgccggatctgtcggaaccgaacctgacctttatccacgtgccgccgggccgcgccaaccgtaccggttggtatctgtacaaccgcgcgccggacatggaatcgatcatcagccatcagccgctggaatataaccgttatcttaataagctggtggcctgggcctggtttaacggcctgctgacctcacgcacccgcctgtttattaagggcaacggcatcgtcgatctggcgaagctgcaggagatggtggccgacgtgtcgcaccacttcccgctgcgcctgccggcgccgacgccaaaggcgctgtacagcccgtgcgaaatccgccacctggcgattatcgtcaacctcgaatatgacccaaccgcggccttccgcaaccaggtggtgcacttcgatttccgtaaactggatgttttcagcttcggcgaagagcaaaaatgcctgatcggcagcgtcgacctgctgtatcgcaactcgtggaacgaagtgcgtacgctgcactttaacggcgaacaggcgatgatcgaggcgctgaaaacgatcctcggcaaaatgcaccaggacgccgcgccgccggacagcgtggaggtgttctgctatagtcagcacctgcgcggcctgatccgcacccgcgtgcagcagatgatctccgaatgtatcgaactgcgtctctccagtacccgccaggataccgggcgtttcaaagcgctgcgcgtctccggccagacgtgggggctgttcttcgaacgtcttaacgtttcggtgcagaagctggaaaacgccattgagttctacggcgctatctcgcacaacaagctgcacgggctatcggtgcaggtggaaaccaatcacgttaagctgccggcggtggtggatggcttcgccagcgaagggattattcagttcttctttgaagacgcggataataacgacagcggctttaacatctatattcttgatgagagcaaccgcgccgaggtctatcatcactgcgagggcagtaaagaggagctggtgcgcgacgtcagccgcttctattcgtcatcgcacgatcgtttcacctacggctccagctttatcaacttcaacctgccgcagttctatcagattgtcgaggtagacgggcgcacccaggtgatccctttccgcacccaggcgattgccgccgcgatacccaccagccaggacgttaccgcctcgccggtgctgcagcagcgctactcgtagatttggcccggataaggcgcgatgcgccgctatccgggaaacacgtcattaacggaatttcaccgtctcaccggcctgctggctcgccgcctgctccagcagatcccagaaggtttcgccgctgcgatcgcagatccactcgtcgcctttgagatcgaagtgatagccgccctgtttggtggccagccacacctggtgcagcggctcctgacggttaataatgattttgctgccgttttcaaagctgatggtcagcacgccgccgttgatttcgcagtcgatgtcgctatcgccgtcccagtcgtccagacgttcttcgatggtcatccacaggctatcggccaggcgatggaattcactgtcgttcataatttgattctgcttttttgatttttgaagatgggtcgcagtatagcgcgaaacaaaagcgcgcgcagtcggatgctaaaggcttgcttttacgtcttctcctgcgatgatagaaagcagaaagaatgaatcacgggcaactatcaatgaaaaacgtttttcctacgcttgccgttttgtttgcgatcttcagcctgaccggctgcggtctgaaagggcctctctatttcccaccggcggacaaaaccgcgccgccgccgaccaaaccggttaaccctggcattcagagcgcaacgccggatcgaaacgatcgtggcgataccggtggtccgagccaggtcaattactaacgataacgttctgttccgcgcaactggagtagatgatgcagttctctaaaatgcatggccttggcaacgattttatggtcgttgacgcggtaacgcagaatgtttttttctcgccggagctgattcgccgcctggcggatcgccaccttggcgtcgggttcgatcagctattggtcgtcgaaccgccctacgatccggatctggatttccactaccggatctttaacgccgacggcagcgatgtgtcgcagtgcggcaacggcgcgcgctgttttgcccgcttcgtccggctgaaaggcctgaccaataaacgtgatatccgcgtgagtacggccaacgggcgtatggtattaagcgtaacggaagacgatctggtgcgggtgaacatgggcgagcccaacttcgagccgtcccaggtgccgttccgcgccaacaaagcggaaaagacctatatcatgcgtgccgccgagcagacagtattgtgcggcgtggtgtccatgggaaatccgcactgcgtcatccaggttgatgatgtggatacggcggcggtggaaactctcggcccggtgatggaaagccatgagcgttttccggagcgcgccaatatcggctttatgcaggtggtcggccggtctcatatccgtctgcgcgtctacgaacgcggcgcgggggaaacccaggcctgcggcagcggcgcttgcgccgcggtggcggtggggatccagcaggggctgctggcggaaacggtacgcgtggaattacccggcggtcgtcttgatatcgcctggaaaggcccgggccagccgctgtttatgaccggcccggcggcccatgtctatgatggatttattcatttatgaaaccaatcggggaagaacagcaggaggttgccagcgcgttgaacgatcgcgcagtggtggactatctgttgcaacatcctgaattttttattcgtaatgccgcccaggtcgaacatctccgcgtcccgcatccggtacgcggtacgatttcgctggtggagtggcacatgatgcgggcgcgtaaccatattcatgtgctggaagaaaatatgtcgctgctgatggagcaggcggtcgctaatgaaagcctgttccagcgcctgctgcagctgcaaacgcggctggcggcggcggagagccttgacgatatgctcaaccgccttcaccgctgggcacgcgagctggggctggcgggcgccacggtgcgcctgtttcctgactgctggcgcctcggcgcgccctcgaagtttacccatctggcattaaaccggcaggcgtttgagccgatccgtattcaacgtctgggccaggcgcgccactatcttgggccgctgaacggcccggagctgctggtggtgctgccggaggcgaaggccattgggtctgtggcgatatcgctgctggggggcgataatgccccgggggtgatgctcttcagcagccgcgatgcgcagcattatcagccagggcaggggacgcagctgttgcaggagattgcccagatgctgcccggcctgctggagcgctggattgaacgcgcatgaccgattctcctctcttctccgccgtcgcccgctttcttcgccatcttggcgttgaacgccagctcagcccgatcacgttactgaattaccagcgacagctggacgcgctgatcgccctggcggatgaggcgggcctgaaaagctggtcgcagtgcgatgccgctcaggtgcgaagctttgcggtgcgtagtcgccgcgcggggttaggcccggcaagcctggcgcttcgcctgtcggcgctgcgcagtttcttcgactggctggtcggccagggcgagctcagcgccaatccggcgaaggggattgccgcgccgaaaattccccgccacctgccaaaaaatattgacgtcgatgacgtcaatcgattgctggatatcgatctcaacgatccgctggcggtgcgcgatcgggcgatgctggaggtgatgtacggcgcgggattgcgtttgtccgaactggtcaacctggatatcaaacacctcgatctcgaaagcggtgaggtctgggtgatgggcaaaggcagcaaagagcgccgtttaccgatcggtcgcaacgcggtggcatggattgagcactggctggatttgcgcggcctgttcggtaccgacgacgacgcgctgtttttgtcgaagctgggcaaacgtatttcggcgcgcaacgtacagaagcgattcgccgagtggggcattaggcaggggctgaacagccatgtgcacccgcacaagctgcgccactcctttgccacccatatgctggagtcgagcggcgatctgcgcggcgtgcaggagctgctggggcatgctaacctctccaccacccaaatctatacccatcttgattttcaacaccttgcctcggtgtacgatgccgcgcatccgcgcgctaaacgggggaaataatgcgtttttaccgacctctgggccagatttccgcgctgacgtttgacctggacgataccctttacgataaccgcccggtgattgaccggacgatgcacgagtcgctggcctttgtgcgcagctaccatccttcgctcagccagttcgacgcccatgagcttaatcagctgcgtcagacgctgctggctgctgaacctgagatttatcatgacgtgaccgtctggcgccaccgtgcgctggagttaggtatgcgtaatgccgggctctccgccgaagcggcgaaagcgggggccgatgcggcgatggaacacttcgctcactggcgcagccgcgtcgatgttccgcaggagacccacgatacgctggcgaagctggcggagaagtggccgctggtggccattaccaatggcaacgcccgcccggaactgttcggtctgagcgactatttccgcttcgtgctgcgcgccgggccggatggccgctccaagccgtttgccgacatgtaccaccttgcggcggagcgtctgaatgtgccgctcgggcagattctgcacgtcggcgatgatctgaccaccgacgtggccggcgctattcgctgtgggatgcaggcctgctggatcaaaccgcaaggcgcggacctgatgcacaccgcggacagccgcctgctgccgcatattgaaatttcacggttggcatctctgacctcgctgatataatcaccagtcactctgtatatattaacaggggttcgtggaaccccttctcttccggcggtgccaatggacgtttcttacctgctcgacagccttaatgacaaacagcgtgaagccgtagcggcctcgcgcaccaatatgctggttctggcaggggcgggcagtggtaagacgcgcgttctggtgcaccgtatcgcctggctgctgagcgtggagaactgttccccgtattccattatggcggtgacctttaccaacaaagcggcggcggagatgcgtcaccgtatcggccagctgatgggcaccacccagggcggcatgtgggtgggcaccttccacggcctggcgcaccgtttgctgcgcgcgcaccatctggatgccaacctgccgcaggacttccaaatcctcgacagcgaagaccagctgcgtctgctgaagcgtctgattaaggcgatgaatctcgatgagaaacagtggccgccgcgccaggcgatgtggtacatcaacagccagaaagatgaaggactgcgcccgcatcatattcagagctacggcaacccggtcgagcagacctggcagaaggtctatcaggcctatcaggaagcctgcgaccgcgccgggctggtggacttcgccgagttgctgctgcgcgcccacgagctgtggctgaacaaaccgcatatcctgcagcactaccgcgagcgcttcaccaatatcctcgtcgatgaattccaggataccaacaacattcagtacgcctggatccgcctgctggcgggcgataccggcaaggtgatgatcgtcggcgatgacgatcagtctatctatggctggcgcggcgcgcaggtcgagaacattcagcgcttccttaacgacttccccggcgcggaaaccatccgcctggagcagaactatcgctcgaccagcaatattctcagcgctgccaacgccctgattgaaaacaacaacgggcgcctgggcaaaaagctgtggaccgacggcgccgacggcgagccgatttcgctgtactgcgccttcaacgatctcgacgaagcgcgctttgtggtgaaccgaattaaaacctggcaggagaacggcggcgcgctggagcaatgcgccattctctatcgcagtaacgcccagtcgcgtgtgctggaagaggccctcctgcaggccagcatgccgtaccgtatctacggcggcatgcgcttcttcgagcgtcaggaaatcaaagacgcgctctcttacctgcgccttatcgccaaccgcaacgacgacgcggcctttgagcgcgtagtcaatacgccgacccgcggcattggcgaccgcacgctggacgtggtgcgccagacgtcgcgcgatcgccagctgacgctatggcaggccagtcgcgagctattgaaagaaaaagcgctggccggtcgcgccgccagcgccctgcagcgctttatggagctgattgacgcgctggcgcaggagaccaccgatatgccgctgcacgttcagaccgatcgggtgattaaagactccggcctgcgcgcgatgtacgagcaggagaaaggcgagaagggccagacccgtattgaaaacttagaggagctggtgacggcgacgcgccagttcagctacaacgaagaagatgaagatctgatgccgctgcaggcgttcctctcccacgccgcgctggaagcgggcgaggggcaggcggacacctggcaggacgcggttcagctgatgaccctgcactcggcgaaagggctggagttcccgcaggtgttcatcgtcggcgtcgaagaagggatgttcccgagccagatggcccttgatgaaggcggccgcctggaggaggagcgtcgcctggcctacgtcggcgtaacgcgcgccatgcagaagctgacgctgacctatgcggaaacccgccgtctgtacgggaaagaggtttatcaccgcccgtcgcgctttatcggcgagctgccgcaggagtgcgtagaagaagtgcggctgcgagccacggtgagccgcccggtaaaccatcagcgactgggcgcgccgattgccgagagcgataccggctacaagttaggccagcgcgtacggcatccgaagtttggcgaaggcactattgtcaacctcgaaggcagcggcgagcacagccgactgcaggtggcttttcagggccagggaatcaaatggctggtggcggcttacgcccggctggaggcagtgtaactttaagaaaaatatcattattttgtaatattctgctacctttatacgttaaggcgcctgatttgcgctttcgcgttccgttgcgtgttgacgccgattttgcgctggcgtaacatgcgcgcacgattacgctaagaggacattcgccttggacacacccagtagatgctggctcaacttcctgtcattcaggaacaactcctaaggctatcctcttatgctgatagccttagcggttgtcagcgacctgccccattcccgtcgcgctgagtcaggcttaatggtctgaaacccaatttgtttctgtgtgcccaccgaactgtccgataatttttttgcattgggagtcccggtcatgctgagcgcatttcaactggaaaacaatcgtttaacgcgcctggaagccgatgagatcaaacacctcgccagctcggtgtgggtcgatctggtcgagcctgacgacgatgagcgaagccgcgtgcagacggaactgggtcaaaacctggcgacgcgcccggaactggaagatatcgaagcctccgcgcgtttctttgaagatgaagatgggttacacatccactcgttcttcttttttgaagatgccgacgatcacgccggcaactctaccgtggcgtttaccatccgcgaaggccgcctgttcacgctgcgcgagcgcgaactacccgctttccgcctctaccgtatgcgcgtgcgtaaccagacgctggtcgacggcaacgcctacgaactgctgctcgacctgttcgagaccaaaatcgagcagctggcggatgaaattgaaaacatctacagcgacctggaaaagctgagccgcgtcattatggaaggccatcagggcgacgagtacgacgaagcgctgtcgacgctggcggaactggaagatatcggctggaaggtgcgcctctgtctgatggatacccagcgcgcgctgaacttcctcgtgcgcaaggcgcgcctgccggcgggccagctggagcaggcgcgggagatcctgcgcgatatcgaatctctgctgccgcacaacgaatcgctgttccagaaggtgaacttcctgatgcaggcggcgatgggttttatcaatatcgagcagaaccgcattatcaagatcttctcggtggtctcggtggtattcctgccgccaactctggtggcctccagttacgggatgaactttgaatttatgccggaactacactggagctttggttatccgggagccatcgtgtttatgatgctggccggcctggcgccatatctctacttcaagcgtaaaaactggctgtaaaaaaagggagcgtcggctcccttctttactggctgatgcaggcttagcctctgcgcaaccggcgctgggtatacagcgcatcgacgataaacaccgccagcgcgacccagataaagccaaaggtcaccattttatccttgcccggcacttcgccgtagaacgtcaccgccagcaggaacatcagcgttgggccgatgtactggaaaaagcccagcgtggagagccgcagacgcgttgccgccccggtaaagcacagcaaagggatggtggtcaccacgcccgcggccatcagcagcagattgagcgaccaggggttctcgcccatatggctggtcgggctgtcggtgatgccgaacaaccagattgccgccaccggcagcagccacagcgtttccaccagcatgccggtttgcgcatcgacagcaattttctttcgcaccaggccgtaaaaggcaaaactgaaagccagcccaagaccgattatcggcagcgaaccaaaggtccacagctggaccagcacgccgcaaaaggcgaggatcaccgccagccactgcagacgacggaagcgttcgccgaggaaaatcatccccaacaaaatattcaccagcgggttgataaagtagccgaggctggcttccagcatatggtggttattcaccgcccagatgaacaacagccagttaccgccgaccagcactgccgagagcgccagcaggaagatcttgcgcggcgttttcagcagctttttcacctgtggccactggcggctgacgctgatgagcgccaccatgaagaagaaagaccagatcacgcgatgggtcagaatttcatcggcgggaacatagtagataagtttgaagtacgctggcgcgataccccagataaagtaggcggcgagggccagaatgatccccaaccgcgtctgtttcgcatccatcggtaaaatccattgccaaagagagtgatgttactcgattttggccaatcaacccaccatataggtggccgttgcgctggcaatatagacctgagcttcgttatgcagttccacgcgggcaactgccactttattgccggcgcgcagcagggtgctggtggcggtaaaacgttcgccgcggcccggacgcaggtagtccacgcgcaggtcgatggttcccatacgggaaagccgctggcgcaactcttcttcgttgatggtgtcatggcgggtaagggtactgccgacgcaaaccaggccagcggcaacgtccagcgcggaggcgatcaccccgccatgcagaatgctttgcgcccagttgccgaccatcatcggctgattattaaagctaagctgggcaaacgctttttcgtagcgttccagttcgagaccgagggcgcggttaaacggcatgtgatagacgaaaatctcccctaccagtttcagggctgcttcggcagtaagttcagacataacaccggttccattcgttaataaaatgttgattttatgcttctaaaatattgatttccactttcggagcggattagggggcaggtgattaataaacaggtagaatggcttcaggttaaacaaaaataaaaactatttttcaggagaccagcatgcgtatctctttggcctgcctggtggcgctgtgcgcgctaccggccggtgttatggcgcaggacgcgtcggtacacgacaaaccggcagtgcgcggcagcattatcgccaacctgctccaggaccatgataatcctttcctgctctacccttatgagagcaactatctgctctatacgtggaccagcgacctcaataaagaggcgatccgcagctatgactgggccgaaaatgcccgtaaagatgaagtgaagtttcagctaagcctggcgttcccgctgtggcgcggtatcctgggcgataattcgctgctgggcgcgtcctatacccagaaatcctggtggcagctctctaacagcaaagagtcggcgccgtttcgcgaaaccaattatgaaccccagctgtttttgggctttgcgaccgactaccagtttgccggctggacgctgcgcgatatcgagatggggtataaccacgactcgaatgggcgttccgaccccacctcgcgcagctggaatcggctttatgcccgcctgatggcgcaaaacggtaactggctggtggaagtgaagccctggtatgtggtgggcaacaccgatgataacccggatatcaccaaatatatgggctattaccggctgaaggtgggctaccagctgggagaggcgatcctcagcgcgcaggggcaatacaactggaacaccggctacggcggggcggaacttggcgtgagctatcccattaccaaacatgttcgcgcctatacgcagatctacagcggctatggcgagtcgcttatcgactataactttaaccaaacgcgcgtcggcgtcgggctaatgctcaacgatctgttttaatcgttgcactctggctcgcaggcgctgaaaatagcgcctgttttcttttcaggcaaatggggtcaatgtggcacaggcggaagtattaaatcaggaatcgctggctaagcaggttttacaagagaccttcggctaccagcagttccgtcctggccaggaaacgattatcgagacggcgctcgaaggccgggactgcctggtggtcatgccgaccggtggcggcaagtcgctgtgctatcaggtgccggcgctggtcatgggcggtctgacggtcgtggtctcaccgctgatctcgctgatgaaggaccaggtcgatcagctgctggccaacggcgtggcggcggcttgtctgaactcgacgcaaagccgcgagcagcagcaggaggtgatggccggctgccgcagcgggcaggttcgtctgctgtatatcgcgccggaacggctgatgctggataactttcttgagcatctggcgaactggaatctggcgatgctggcggtagacgaagcgcactgtatctcgcagtggggccatgacttccgtccggaatatgccgcgctgggccagctgcgtcagcggatgccgcagatcccgtttatggcgttgaccgccaccgccgatgataccacccgccgcgatattgtccgcctgctggggcttaacgatccgctgattcaggtcagcagcttcgaccggccaaacatccgctatatgctgatggagaaattcaagccgctcgatcagctgatgcgctacgttcaggagcagcgcggcaaatcgggcattatctactgcaacagccgttcgaaagtggaagacaccgccgccaggctgcaaagccgcggtattagcgcggcggcttaccatgccggtctggaaaacgacgtgcgcgccgaggtgcaggagaaattccagcgcgacgatctgcagatcgtggtggcgacggtggccttcgggatgggcattaacaagccgaacgtccgctttgtggtgcattttgatattccgcgcaatattgaatcctactatcaggagaccggccgcgccgggcgtgatggcctgccggcggaagcgatgctgttttacgatccggcggatatggcgtggctgcgccgctgtctggaagaaaaacccgccgggccgctacaggatatcgaacggcataagctgaatgcgatgggggcgtttgccgaagcgcagacctgtcgccgtctggtgctgctgaactattttggcgaagggcgtcaggagccgtgcggcaactgcgatatctgtcttgacccgccaaagcagtacgatggcttaatggacgcccgcaaggcgctttcaacgatttaccgggtcaatcaacgcttcggaatgggttacgtggtggaggtcctacgcggggccaacaaccagcgcatccgagagatgggccacgataagctgccggtttacggtatcggccgggagcaaagtcacgagcactgggtgagcgtgatccgccagctgatccaccttgggctggtgacgcagaatatcgcccagcactccgcgctgcagctgaccgaagccgcgcgaccggtgctgcgtggcgaagtgccgctgcagctcgccgtgccgcgtatcgtggcgctgaagccaaaggcgatgcagaaatcctttggcggcaattacgaccgtaaactgttcgccaagctgcgcaaattacgtaaagcgatcgccgacgaagagaacatcccgccatatgtggtctttaacgacgcgacgcttatcgagatggccgaacaatcgccgctgaccgccggcgaaatgctcagcgtcaacggcgtggggactcgcaagctcgagcgtttcgggaagccctttatggcgctgatccgggcgcatgttgatggcgacgatgagtagtcagctggctgaaaaagtgccagaatagtttctctcttcattattttcctgcgggttaactatgctgatgcttttcctcaccgtggcgctggtgcatatcattgcgctgatgagcccggggccggactttttctttgtctcacaaacggccatcagccgctcgcgcagagaggcgatgatgggtgtgctggggatcacctgcggcgtcatggtctgggcgggagtggcgctgctcggcctgaacctgatcctcgcccggatggcgtggctgcataacattataatggtcggcgggggcctgtatctatgctggatgggctaccagatgctgcgtggcgcgctgaaaaaagagacggtggcctcggcggagccgcaggtggagctggcccgcagcggacgcagcttcgtgaagggattgctgaccaatctggcgaatccgaaagcgattatctacttcggctcagtgttttcgctgttcgtgggtgacagcgtcggcgccggcgcgcgctggggcattttcctgctgattatcgttgagacgctggcctggtttatggtggttgccagcctgttcgccctgcccgggatgcgccgcggctatcagcggatggcgaagtggatcgacggtatcgccggtacgctgtttgcgggcttcggcatccacctgattatctcgcgttaaccggcatgctgtttcctacccggttgtttccgggtgggaaagtatcagtggcgaagccgctgcagctcgtcttcagacagaccggtcatttccataatcgcctggtcatcaataccgcgattgcgcatcgcttcggcaacctgcaccagagcctggtgtttaccttcttttatgccctgctgtacgcctttctccataccttctgcaagccatgtttccgccagcgtcatcagtaatcctccatgctgcggcacgcgctgtgccagcccgtacaagagtgtccgagtatcttcggcatcccctgcctgagccatatagtttaccaatacggtgatttgttgtccgctcatctgctccagcagtaagaggtgggtcaacttatccagcaattgcgccatatcgcgctggcggatgtgcttttgcaccagcgtcagggctgccatgctgcggtgctgcatgatgtcgtcgtcggggatcaccgtgatatcgaccagcggaaacgccccgctatagagctggctggcggtctcaggatcggcaaaattatccagccagcgcatcgaccagggataggggctgcgtcgtccctgatagaagagaatagggataaccagaggcagcgttttatggccgctctccaggtgccgctgcatggcggcgatggcatagcgcattaagcgaaaggccatcagcttatcgggtgcgctctggtgctcgatcagaacatggacatagcccgcaccgcgggtggtttccagcgaatgtaggatatcgctgtagtaaggcctgagatcgtcttcgagaaagctgccggattccagacgcagggtgtccagtttgcagatctgtgttaacgacggaggcaggtggagctcgataaaatcgcgcgccgtctctacccgtgagagaaaagttttaaataccgcatcatgaggggtcgccgtttccgccattgccgttcatccatgaatcacgtatctggcggcatcctggcacggcgggttcagcgccgacagcgggcaaaaaaattaattacccactttgcgcgccggctcgcgcagagagaaagcgtcgttcacctcgcgaacctctctttgcgagcgagattccatgattcaggcatggcgggcggaggcgagcagcgccccgaccagcataaacagtgaaccaaagactttgttcaacgccttcatctgctttggccctttgatccatgcggaaatgcgctgcgccagggtcgcatagccaatcatcacaatgatatcgacgacgatggtggtgacgcccagaacgatatattgcatcacctgcggctggtgcggcaggataaactgcggaaacagggcggccagaaaaacaatgcttttgggattggtgagatttacgaacaccgcgcgctgaaacagtttgccgcgcgtctgcgccttcgccagcgtattcaggtcgatcgcccctgccgcccgccattgctggatacccagccagatcaggtaggcggcgccggcccatttcagcacctcaaaggccagcaccgagcgggagaagagagtgccgagaccaacgccaaccagcacgatatgaatggccagcccagtctgcaaaccggcaatcgacgccgccgcgccgcggtatccgtggttaatggaagtggtcatggtattaatcgctccggaacccggcgacaggctgagaataattgatgtcagcaggtaggcgaaccaccactcaatggtcatgagaaactccctgattgtctgtttttatgccacaatacgctattgtgtcagtattgtgtgatacacggtaaaaaaacgattttcagcggttaacaggggtgtaaacccgatgtttgggcagaaaaaggactgggaaacacgagaaaacgcgtttgcggcctttagcatggggccgctgacggatttctggcgacagcgcgaagaagctgaatttaaaggcgtcgacgatgtaccggtacgctttgtccgcttttgcgcgcaacataacgatcgtctggtgttgatttgccccgggcgcattgaaagctacgtgaagtatgctgaagtggcctacgatctctttcactgcggctttgacgtgatgatcattgaccatcgcgggcagggacgctcgggccgcctgctctcagatacccaccgcggacacgtggttaacttcagcgactatgttgatgacctggccgcgctctggcagcagcaggtggttcctggacactggcgaaaacggtttatccttgctcattctatgggcggagcgattgccacgctttttctgcaacgttaccgggcgcattgcgatgcaatagcgctctgcgcgccgatgttcgggattatcattcggctgccggactggatggtgcgccatattctcgactgggctgagggccatcagcgcattcgcgaagagtatgccatcggcaccgggcgctggcgggcgctgccttttgccgttaacgtgctgacgcacagtcggcaacgctatcgtcgcaacctgcgcttctatgccgatgagccgcggctgcaggtcggcggtccgacctggcactgggtgcgtgagggcatgctggccggcgacgaagtgctggcgaatgtggaaaaagataccgccccgacgctgcttttacaggcggaagaggagcgggtggtcgataatctgatgcacgaccgctattgcgaattacgggccgctgccggccatccctgtgagggcggtaagccgctcgtcattgaaggggcatatcatgagatcctttttgaaaaggacgctatgcgctcagtcgcgctcaatgccatcgtcgagtttttcaatcgacatacttaatccgacgataacgctcgtcgccctgcttagaggttaacttttttatgtaccaggttgttgcgtctgatttagacggcacgctgctttcccccgatcatttcctgaccccgtatgccaaagagacgctgaagctgctgaccgcccgtgggatcaatttcgtcttcgccaccggccgtcactacatcgacgtcgggcaaatccgcgataatctcggcatccggtcgtacatgatcacctctaacggcgcccgcgttcacgatagcgatggtcagcaaatctttgcccataacctcgatcgcgatattgccgccgacctgtttgagatcgtgcgtaacgacccgaaaatcgtcactaacgtttatcgggaagacgagtggtatatgaaccgccatcgtccggaagagatgcgcttcttcaaggaggcggtgtttaactacaagctgtatgagccgggcgaactggatccgcaggggatcagcaaagtattctttacctgcgaggatcatgagcatctgctgccgctggagcaggcgatgaacgcccgctggggcgatcgggtgaacgtcagcttctccaccttaacctgcctggaagtcatggcgggtggggtatcgaaggggcatgcgctggaggcggtggcgaagatgctcggctacactctttccgattgcatcgccttcggcgacggtatgaatgacgctgagatgctgtcgatggctggcaaaggctgcatcatggccaacgcccaccagcggctgaaggatctgcatccggaactggaagtgatcggcagtaacgccgacgatgctgtcccgcgctacctgcgtaagctatacctcgactgaaaaagattgacgactggcgaataagtgtccagtcgtcaacctgactcttcgctacaatgcctgttctttatccaacgagacgaccattgtggcgctgttaattatcaccactatcctgtgggccttttcttttagcctgattggcgaatacctggccggtagcgtcgacagctatttttcggtgctgatgcgcgtgggcctggcggcgctggtgttcctgcctttcctgcgcacgcgcggccagtcgccgcgcacgatcgtgctctatatgctggtgggcgcgatgcagctaggcatcatgtacctgctggctttccgcgcctatctctatctgacggtctcggaatttctgctgtttaccgtgtttactcccctgtatatcacgctgatctacgacctgctcagcggacgtaagctgcgctggggctatctgctgagtgccgcgctggcggtgctgggggcggcgattatccgctatgacaaagtcagcgatcatttctggaccgggctgttactggtacagctgtcaaacctctgcttcgccatcggtatggtggggtataagcgtctgatggaggtgcgtccgatgccgcagcacaatgcctttgcctggttctatgtcggggcctttatcgtggcggtggcggcgtggtttatgctcggcaacgcccagaagctgccgaccaccacgctgcagtggagcgtgctggtgtggctcggcgtggtggcttccgggctgggttactttatgtggaactatggcgccacccaggtggatgccggcacgctggggatcatgaataacgtccatgtccccgccgggctgctggttaaccttgccatctggcaggagcagccgcactggccgagctttattagcggagcgttggtgatcctggcctcgctgtgggtccatcgccgctgggtcgctccgcactccggacaaacggcagatgatcgcaggcgtggttccgcgcagagcgaataaacgcttcggtgaccggttgacgctgttcgccatcgcgaacggccgcgtacaaccggctccataatccctcacccagggttttggtgaccaccaggccctggcgttcaaagctttccaccacccagtgcggcagcgcggcgatgcccatccgggcagccaccatctggatcaacaacagcgtgttatcgacgcttttcagctgcgggctgatgccggccggctgcaggaagtggcgccagatatcgaggcgcccgcgctgcacgggataaatcaacagcgtttccgcggccagatcctccggggtaaccagcgtcttcatagctaacggatgctcgggcgccagcaccagacgcacctcaaaatcaaacatcggcgagtagtgcaggccgctgcgcggcagaatatcggaggtcatcaccagatccagttcaccctgctgcagcgcaggctgtgggtcgaaggtgacgccggaatggaagtcgacctccacatgtggccagcgggcgcggaaattctccagcgccggcgtcagccactgaatacagctgtgacattcgatagccagcctcagccgggtctgctgtggttcgttacagtcctgcagggcgcgagcgatctgcggcagcacctggttggccagctgtaagaggatttccccctgaggagtaaaacgcagcggctggctcttacgcacaaagagacgaaagccaaggcgctgttccagatcgctgaactggtgagacaaggcggactgggtctggtgcagggccgctgccgcacccgccagtgaaccgctgttccgcaacgcttgcagcgttttcagatgtttaatttcgatcatgaaagtccttcacttcgccatgagcaatttgcgcttgaggaatatacagtaactgtcaattatggatgtgtaaacatctggacgtctaaaactcgtcatatttcgacttgcagatgcgttggctgccttgcataccccagtcacttccttcagtaagctcctggggatgcgcatcgttgccgccttcctgcaagccgaactattgagattttttcttcagattcaatggaataagagaggaacaaaaatgacaattattaaccacaccctcggttttcctcgcgttggcctgcgccgcgagctgaaaaaagcgcaagagagctactgggcgggcaacgccactcgcgaggaactgctggcggtaggccgtgagctgcgcgcccgtcactgggagcagcagaaacaggcgggcgttgatctgctgccggtgggggatttcgcctggtacgaccatgttctgactaccagcctgctgcttggcaacgtgccggctcgtcatcagaacaaagacggatccatcgacatcgataccctgttccgcattggccgcggccgcgcgccgactggcgaaccggccgccgctgcggaaatgaccaaatggttcaacaccaactatcactatatggtgccggagttcgtgaagggccagcagttcaaactgagctggacccaactgctggatgaagtagacgaagcgctggcgctgggccacaagatcaagcccgtgctgctggggccggtaacctatctgtggctgggtaaagtgaaaggtgaaccgtttgaccgcctgaccctgctgaataccatcctgccggtttaccagcaggtgctggccgaactggcgaagcgcggtatcgattgggtgcagattgatgaaccggcgctggtgctggagctgccgccagcgtggctggaggcctttcaaccggcttatgacgccctgcagggccaggtgaagctgctgctgactacctattttgaaggcgttagcgacaatctcgcgaccattgctgcgctaccggtccaggggctgcacgtcgatctggtgcacggcaaagatgatgttgccgaactgcacaaccgcctgccggccgactggctgctgtccgcgggcttgatcaatgggcgtaacgtctggcgcgccgatctcaccgaaaagtatgcgcaaattaaagacctcgtcggtaagcgcgagctatgggtcgcgtcatcctgctctctgctgcatagcccgatcgatctgagcgtggagacgcgccttgatgcggaagtgaagagctggtttgccttcgcgctgcagaaatgcggtgagctggcgctgctgcgcgatgcgctgaacagcggcgatacagcggcgattaccgagtggagcgcgccaatccaggcccgtcgccattcgacccgcgtgcacaacgcggaggtggaaaaacggctggcggcgatcactgctcaggacagccagcgcgccagcccctatgaggttcgcgcgcaggcacagcgccagcgctttaacctgccgaaatggccgaccaccaccatcgggtcattcccgcaaacgaccgagatccgcggcctgcgcctggacttcaaaaagggtaaccttgacgccagtcattatcggacggggattgcggaacatattaagcaggcgatcgtcgagcaggagcggttaggtttagacgtactggtgcacggggaggccgagcggaacgacatggtggaatacttcggcgaacatctggacggttttatcttcacgcaaaacggctgggtgcagagctatggttcccgctgcgtgaagccgccggtggtgatcggcgacgtcagccgtccgcaggcgatcaccgtcgactgggcgaagtacgcgcagtccctgaccgccaagccggtgaaagggatgctcactggaccggtgaccattctgtgctggtccttcccgcgggaggatgtcagccgtgaaaccatcgcgaaacagattgcgctggccctgcgtgatgaagtggcggatctggaggcggcggggatcggcatcatccagattgatgagccggcgctgcgcgaagggttaccgctgaagcgcagcgactgggatgcctatctgcagtggggtgtggaagccttccgccttaatgctgcggtcgccaaagacgacacgcagatccatacccacatgtgctattgcgagttcaatgacatcatggactccattgccgcgctggacgctgacgtgatcaccattgaaacctcgcggtccgatatggagctgctggagtcgttcgaagcgttcgagtaccccaatgagatcgggccgggagtatatgatattcactcgccaaacgtgccgagcgtggagtggatcgaagcgctgctgaagaaagccgcgcagcgtatcccggtggagcgactgtgggttaacccggactgcggcctgaaaactcgcggctggccggaaacccgcgccgcgctggcgaatatggtgcaagcggcgcgaaatctgcgccagtccgcctaatcgttacgcgaaaaatcaaaaaggaggcatttgcctccttttttcatgcttagggcgattacccttttttaccgccatactgagcaaaccaggcgagcatccgttgccagccgtctttggctgactcttcatgatagctggcgcgatagtcggcgttaaaggcatgatcggcttcgggatagaccacgatttccgccgtggcgttggctgcccgcagcgcctgacgcatagtctcgacggtgtcctgcggaatgctggcgtctttagcgccgtacagaccaagcaccggggcgttgagatcgacggcgatatctaccgggtgcttcggcgaattcagtgatttttctcccaccagcttaccgtaccaggccactgccgctttaagctgcgggttatgcgcggcatacagccaggtaatgcgtccgccccagcagaagccggtgatcagcagacgatgggcatcgccgccgtggcgcgccgcccagctggcgacgtggtcgagatccgccagcacctgcgcgtccggcaccttgctgaccagctctttgaacagggtcgggatatcgtggtactcattcggatcgccctgacggaagtacaattcaggcgcgatagccagatagccttcctgtgccaggcggcgacaaagatcgcgaatatgttcatgcacgccgaaaatttcctgtaccacgataacgatcggcagtggaccgtcggcatttttcgggcgggcgtggtaggccggcatgttttcaccctgagagggaatcgacgtctctccggcgataatatgctcttccggcgtatgaacggcggttgcggcgtgtggtgaagctgcaggtgcgaatccaggttgcttggtggtggtcatggtattctccgtacccttatttattagcgcatcagtaactatagaccctttacctttagttcgggcggtaataaagcacagtgcctgaaagcggctatcttttgttctgtgatgatgaatataacttgttaatgtgatgtgtatcactatttactgaaaaacaactgcaatcattattggtcttggtgactatcatcacaaaatgttgccaggggcttctgtacagtaccgttttgcttctgctgataattcgacccacagaggagttttttatgtccaagtctgatgtttttcatctcggcctcaccaagaacgatttacaaggggctacgctggctatcgtccctggcgatccggagcgtgtggaaaagatcgccgcgctgatggataagccggttaaactggcatctcaccgcgaatttacctcctggcgcgcggagctggacggcaaaccagtgatcgtctgctctactggcatcggcggcccgtcgacttccatcgccgtggaagagctggcgcagctgggggtgcgaaccttcctgcgtatcggcaccaccggcgcgattcaaccgcacattaacgttggcgatgtgctggtgactaccgcctccgttcgtctggacggcgccagcctgcacttcgcgccgatggagttcccggccgtcgcagacttcgcctgtaccaccgcgctggtggaagcggcgaaatcaatcggcgcgaccacccatatcggcgtaaccgcttcctcggataccttctacccgggccaggagcgttacgacaccttctccggccgcgtggtgagccgcttcaagggctcaatggaagagtggcaggcaatgggcgtgatgaactatgaaatggaatccgccacgctgctgaccatgtgcgccagccagggcctgcgcgccgggatggtggctggggttatcgtgaaccgtacccagcaagagatccctaacgccgaaaccatgaagcaaaccgaaagccacgcggtgaaaatcgtcgtggaagcggcgcgtcgtctgctgtaactcaacactttccctgtcaggccggatcctccggcctttcttttttgcgtcgcctctcgcaggaaattccttttaaactggacgtttgtacagcacaattctattttgtgtcatcaggttatcgcagggggcgtcgtggatctctccattattatcagcgcggttatcgcactggcagccgggttaatggtcggctggctggcgaccaaagcgcgcgccgatcaaattcgggccgatctcatcgaggaacggcgagagttggatattgagctgagcgccgcccgccagcaactggcgcaggaggcccactggcgtgaggagtgtgagctgctgaacaacgagctgcgcagcctgcgggatatcaatacctcgctcgaggccgatctccgtgaggtcaccacccggctcgaatccacccagctgcatgcggaagataagatccgccagatgatgaacagcgagcagcgccttagcgagcagtttgaaaacctcgccaaccgtattttcgaacacagcaaccggcgggtcgatgagcaaaaccgccagagcctgcatggcctgctgacgccgctacgcgaacagctggacgggttccgccgccaggtgcaggagagctttggccaggaggcgcgtgaaagacataccctggcgcatgagatccgcaatctgcagcagttgaacgcgcagatggcacaggaggcgctgaacctgaccaaagcgctgaagggggataacaaaactcagggcaactggggggaagtggtcttaacccgcgtgctggaggcctccggcctgcgcgaaggctatgagtaccagactcaggtcagtattgagaccgacaaccgctcgcggatgcagccggacgttatcgtgcgcctgccgcagggtaaggacgtggtgatcgacgccaaaatgaccctggtcgcctatgagcgctatttcaacgccgaagacgactacacccgcgaagtcgcgctgcaggaacaccttgcctcggtgcgaaaccatattcgcctgctgggacgcaaggattatcaacagctgcctggcctgcgctcgctcgactatgtgctgatgtttattcccgttgagccggcgttcctgctggccatcgatcgccagcctgagctcatcagcgaggcgctgcaaaataatattatgctggttagcccgacgacgctgctggtagccctgcgcactatcgccaatctgtggcgctatgagcaccagagtcgtaacgcgcagaagattgccgagcgggcggggcgcctttacgacaaaatgcgcctgtttgtggatgatatgtccgccatcggccagagcctggataaggcgcaagagagctatcgccaggcgatgaaaaagctcgcttccgggcgtggtaatctgctggcccaggcggaggcctttcgcggcctgggcgtggaggtcaagcgcgggattaatcctgatttagtcgaacaagctacggctcaggacgagcaatatcgtctcgaagatgaggataacctgccggaaaatgacgcattttcagccgactctgccgagacggtgcgtagccgggaggcggctccgccacgctgaaacgtatgggaaatgcgctgagtctgatacactcagtgaacattttcttgaaaagcaagcaggcatagagatggttgaggattcacaagaaacgacgcactttggctttcagacggtcgctaaagagcagaaagcagatatggtggcgcatgtattccattctgtcgccgcaaaatatgatgtgatgaacgacctgatgtcgtttgggatccatcgtttgtggaagcgtttcaccatcgactgcagcggcgtacgtcgcgggcagaccgtgctggatctggctggtggtaccggtgatttgacggccaagttctcccgcctggtaggggaaaccggccgcgtcatgcttgctgatatcaatgattctatgctcaaaatgggccgcgaaaagctgcgcaatatcggcatcgtaggcaacgttgagtatgttcaggccaacgcggaagccctgccttttgctgataatacctttgactgcatcaccatctctttcggtctgcgtaacgtgaccgacaaagagaaagcgctgcgttcgatgtaccgcgtgctgaagccgggcggacgtctgctggtgctggagttttctaaacccattatcgaaccgctgagcaaagcctacgacgcttactccttccatatcctgccgaaggtgggcgagctggtggcaaaggatggcgacagctatcgctacctggcggaatctattcgtatgcatccggaccaggaaaccctgaaagggatgatgcaggatgcgggcttcgaaaacgtggattactacaacctgacggcgggtatcgttgctttgcatcgcggttacaagttctgacaggagggacgctatgcctttcacacccctggttaccgctggcattgaaacggcgctgaatactttcctctggcgcgacaaagcgcttaaacccgctcgtcagcgcctgctgggcaaggtattgcgggtccagctgcaggatttcgccacgcccgtggtgctggtattcagcgaacgccaggttgacgtcctgagcgcctgggacggagaggccgattgcaccgtgattacccggctcagcgtgctgccaaaactacgcaatcgtcagcagctcacggcgcttattcgcagcggtgatctggaagtgcagggcgatctgcaggtggtgcagaatatggtctccctgtgcgacctggcagagtttgatcccgctgaactgctggcgccctataccggcgatattgtggccgaaggcgtcggtaaagtcctgcgcggcggcgctcagtttctgctgaagggggcagagcgccagcagcgctatgtcgcggaagcgatcactgaagagtggcgcctggcgccggggccgctggagctggcctggtttgctgaagagacaacggctattgagcgcgcgctggccgcactggaaaaacggctggaaacgctggagggcaaatgacgccaggagaattacggcgcctgtatttcatcatccacacctttttgagctacgggctcgatgagctcatccccaaaatgcggatcacgctgccgctgcgtatctggcggcggatgctgttctggatgccaaaccgccatcaggatcagcctcttggcgcccgccttcggctggcgctccaggagctggggccggtgtggataaaattcggccagatgctttccacccgccgggatctctttccgccgcatattgccgatcagctggcgctgttgcaggaccgcgtggcgccctttgaagggaagctcgcgcagcagcagatagagaaagcgatgggggggctgccggtcgagacctggtttgatgatttctccgttgagccgttagcctcggcgtccatcgcccaggtgcataccgcgcgtctgaaagagaatggcaaagaggtggtgatcaaggttatccgcccggatattttgccgatcattaaagcggacatgaagctcatctaccgcctggcgcgctgggtaccgcgtctgctgcctgacggtcgtcgtctgcgcccgcaggaggtagttcgtgaatatgaaaaaacgctgctggatgagctgaacctgctgcgggaatccgccaacgctattcagctgcggcgtaatttcgaagacagcccgatgctgtacgtgccggaggtgtaccccgactactgcagcgaaagcatgatggtaatggagcgcatttacggtatcccggtgtccgatgtggaggcgctggaggcccagggcaccaatatgcagctgctggcggagcggggcgtgcaggtcttcttcacccaggtgttccgcgacagcttcttccatgccgatatgcatcctggcaacatattcgtcagctacgagcatccggaagatccgcagtatatcggcatcgactgcggtattgtcggctcactgaacaaagaagataagcgctatctggcggaaaactttatcgcctttttcaaccgcgattatcgtaaagttgccgagctgcacgtcgattccggttgggttccgcccgataccaacgttgaagagtttgagttcgcgatccgcacggtctgcgagccgatctttgagaagccgctggcggagatctccttcggccacgtgctgcttaatctgttcaataccgcgcggcgtttcaatatggaagtccagccgcagctcgttttactacagaagacattactttacgtagaaggggtaggccggcagctctatcctcagttagacttgtggaaaacggcgaagcctttcctcgagtcgtggatcaaagatcaggtcggcattccggcgctggtgcgcgcgtttaaagacaaagcgccgttctggatcgaaagaatgccggaaatacctgagctggtgtatcagagcctgcagcagagcaaacagctgcagaccagcgtcgatactattgtgcgggatatgcgtgtgcgtcatgtgcgccagggccaatcccgttacctgtttggtataggcgcggttttattgctcagtggtacgctgctctttatccatcgccctgagtggggaatgatgcccggttggctgatggccggcggtgtggtgacctggcttattggctggcggaaaacccactgatcggttcgcctcttcatgacgcaggcttatttgcgcaaaatcatgtcggcggcctgacgaagaggcggctcgcaggatggcgtgtataatgcgtccacacaattcatcatctgtcataggggaacgtgtatgggtggtatcagtatttggcagttattaattgttgtcgtcatcgtagttctgctttttgggacgaagaagctgagctcgctggggtctgacttaggggcatctatcaaaggctttaaaaaagccatgagtgatgatgataaacccgaaaagtcggcgccagacgcagatttcacggcgaaaaccatcgccgataaacaggatgatgcaaaaaaagacgagacaaaacgccacgacaaagagcaggtgtaactcgtgttcgatattggttttagtgaactactgctggtgtttgtgattggcctcattgttctggggccacagcggcttcccgtagcggttaaaacggtagttggctggatccgtacgttacgctcgctggcgaccacggtacaaaatgagctggcccaggagctaaaactgcaggagttccaggagagcctgaagaaggtggaaaaggctagcctgaataacctgacgccggagctgaaagcctcgatggatgaactgcgcgaggccgcggagtcgatgaagcgctcctatagcgcccacgatcccgaaaaagccagcgacgaagccaataccatccttaatccggtggtcaaaggcagcgaagcgcagcgccaggacgtcacgccggcgacggcagaacatcaggccagcgctccggctcatgcgccagatcccgttgccgccgagcaatctgcttcaccggctgaccttcaggcagagaaaacgtccgctacggcggtagttccccattcttcccccgcatcgagtgataaaccgtaaacatgggcgtagacgatacacaaccgctaatttcgcatctgattgagctgcgcaagcgtctgctcaacagcatcattgctattctggtgatcttcctggcgctggtctatttcgccaatgatatctaccagctggtctcggccccgcttatcagtaagatgccagtgggcgcgacgatgatcgccaccgatgtcgcttcacctttctttacgccgataaagttgaccttcatggtgtcggtgatcctgtcggtgccgattattctttaccaggtatgggccttcgtcgcgccggcgttgtataagcacgaacgccggctggtggtgcctttactggtatccagtaccctgctgttctatatcggcatggctttcgcctattttgtcgtgtttccgctggcgttcggcttcctgacccatgcggcgccggaaggggtgctggtctcgaccgatattcgcagctatctcgacttcgtgatggcgctgtttatggcattcggggtctcctttgaggtgccggtcgccattgtgttgctctgctggatgggcgttaccacgccggaagacttgcgtaaaaaaaggccgtatgtgctggtgggtgccttcgtggtgggcatgctgctgacgccgccggacgtattctcgcagacactgctggccattccgatgtactgtctgtttgaagtcggggtgttctttgcccgcttctacaccgggaagcgcctgacgcgcgatgacgacgccgcggccgaagctgaagccgcagagcacagagaagagtaataccgccaaccgcccgtcagggcggttggcatatgggagcgatcatgtttgatatcggcgttaatctgaccagttcgcagttttcccgcgatcatgatgaggtagtggcgcgcgccctggcggcgggggttaacggcatgctgctgaccggcacaaatttggcggagagccagcaggcgcagaaactggcgagccgctattccggctgctggtccacggcgggggttcatccccatgacggtagcagctggacgccagcggtcgccgaggcgatttacaccctcgccggcgagccgcaggtggtggcgataggcgagtgcggtctggattttaaccggaatttttccacgccgcacgagcaggaggtagcgttcagcgcccagctggcgctggccgctgagctgtcgatgccggtgtttttgcactgccgcgacgcccacgatcggtttctgacgctgcttaaaccctggcttgagaagctcccgggcgcggtgctgcactgctttaccggcagccgcagcgaggtgcaggaatgcctggatctgggcctgtttatcggtattaccggttgggtttgcgatgagcggcggggactggagctgcgcgagctgctgccggcgatcccggcggaacgtctgctgctggagaccgatgcgccttatctgctgccgcgcgatctcaagccgaaaccggcctcgcggcgtaacgagcccgcgtatttgccgcatatcctggccagcgtcgcggcctggcgcggcgaggaggcgcaatggctggaggcgcaaacggacgcaaacgtcagggcgctgtttggcgtcgacattaacggcgtttagattttctggaagtcggtatttttaacgctctgcaggacttgcttattcagcaggtttaacagcaacatagagcgcgcttcgccgtcgggctcggtgaagatcgcctccaggccttcaaacgcgccgtcggtgattagcacgctatcgccctcatgcggcgtttccgggtcggtaatcccttccggtttgtagatagaaagctgatggatgaccgccgaggggacgatagcgggtagggcgccaaagcgcacgaagttgttaaccccgcgagtggcgctgatggtggtggtatgaatcacctctggatcgaactcaataaacaggtagttcgggaacaacggttcgctgaccatggtgcgtttaccgcgaatgattttttccagcgcaatcgtcggcatcaggcagttaactgactgacgttccagatgttcctgggctcgttgtagctgcccacgtttgcaatacagtaagtaccaggcttgcataatgactcattccacttctaataacggcaagcataacaaatggctggtgtaatcgcgaaagccattataattgaaatccaaatttcagcgttctttcacgctaatttaacaaaattacagcatcgcgccgtcgaacaccgtataattagccgcctgtagagaggtcaataacacttccatgaaatatcacgatcttcgcgactttctgacactcctggaacaacagggcgaactaaaacgtatcactctgccggtcgatcctcacctggaaatcaccgaaattgccgaccggactctgcgcgccggcggcccggcgttgctgtttgagaatccgaaaggctataccatgccggtgctgtgcaatctgttcggcacgccgcgtcgcgtggcgttggggatggggcaggaggatgtcagttcgctgcgcgaggtgggtaaactgttggcctttctgaaagaacctgagccgccaaaaggcttccgcgacctgtttgataagctgccgcagttcaagcaagtgctgaatatgccgaccaaacgcctgcgcggcgccccctgtcagcaaaaaatcatccagggcgatgatgtcgatctgaataaaatcccgattatgacctgctggccggaagatgccgcgccgctgatcacctgggggttgacggtaacccgcgggccgcacaaagagcggcagaacctgggaatttatcgccagcagctgatcggcaaaaacaaactgattatgcgctggctgtctcatcgcggcggcgcgctggatttccaggagtggtgcgcggcgcgtccgggcgaacgcttcccggtttccgtggcgcttggcgccgatccggcaaccattcttggcgcggtgacgccggtgcccgataccctgtcggaatatgctttcgcaggcctgctgcgcggcaccaagaccgaagtggttaagtgcgtttccaatgaccttgaagtgccggccagcgcggaaattgtgcttgaaggctacattgaggccggtgaaatggcgccggaaggcccgtatggcgatcacaccggttactacaatgaagtggacagcttcccggtatttacggtaacccatattacccagcgtgaagacgcgatttatcattctacctataccggccgaccgcccgatgagccagcggtgctgggcgtggcgctgaatgaagtctttgtgccgatcctgcaaaagcagttcccggaaatcgttgatttctatctgccgccggaagggtgctcctatcgcctggcggtggtgaccatgaaaaaacagtacgcgggacatgccaagcgcgtaatgatgggcgtctggtcgttcctgcgccagtttatgtacaccaagttcgtgattgtctgcgatgacgacgtcaatgcacgcgactggaacgatgtgatttgggcgatcactacccgtatggacccggctcgtgatacggtactggtagagaatacgccaattgattatctggattttgcctcgccggtttccggcctgggttcaaaaatggggctggatgccaccaataaatggcctggcgaaacccagcgtgaatggggtcgcccaatcaaaaaagatcctgccgttacggcgcgtattgacgccatctgggatgaactggccatctttaaacaacagtaagcggggctaacgccgctgttttgctctattgacccgacagaggggacgcatgacaaccttaagctgtaaagtgacctcggtggaggcgattaccgataccgtatatcgtgttcgattagtgccggaagcggcattttccttccgtgccggccagtatctgatggtggtaatggatgagcgcgacaagcgcccgttctccatggcttccacgccggcggaacaggaatttatcgagctgcatatcggcgcctcggagctcaatctgtacgcgatggcggtcatggatcgcattctgaaagagcgtgaaattgaggttgatattccgcatggcgaagcgtggctgcgcgatgacgaagatcgcccgctgattctgatcgccggcggtaccggattctcttatgtgcgttctattctgttaagcgcgctggcgcgtaacccggatcgcgatatcgccatttattggggcggccgcgaggctaagcatctgtacgatctggccgagctggaagcgttaagcatcaagcatccgaatctgcgcatcgagccggtggttgaacagccggaagaagggtggcgtggtcgctccggtacggtactcaccgccgtgctgcaggattacggtacgctggccgagcatgacatctacattgccggtcgttttgagatggccaagatcgctcgcgacctgttctgtaatgagcgcggcgcgcgtgaagatcgcctgtttggcgatgcgtttgcgtttatctgaaaataaaaaacccgcccctgacaggcgggaagaacggcaactaaacctgctctcttcgccatagccgccaggttctggtggcaatggcgttgagataccctttcgcttaaacccgctcaaacacggtagcgatcccttgtcccaggccgatacacatggtggcgagtccgaactgagcgtctttgcgctccatctggttgatcagcgtggtgctaatacgcgccccggaacagcccagcggatgaccgagcgcgatcgccccgccgttgaggttgatcttctcatcgatctgctccattaagcccagatctttaatacacggtaggatctgcgcggcaaatgcttcattcatttcaaaaacgtcgatatcgctggtggataagcccgcttttttcagcgccagctttgaggccggaaccgggccataacccataatggacgggtcgcagccgaccaccgccattgaacggacgcgagcgcgcggcttcagccccagctcgcgagcgcggctttcgctcatcagcagcatcgccgctgcgccatcggaaagggcggaagaggtacccgccgttaccgtaccggtcaccgggtcaaacgccggtttaagcgtggacagcgtctcgacggtggtttccgggcggatcacctcgtcatagttaaaggacttgagtacgccatcggcatcgtggccgccggtggggataatctccgctttgaatgcgccggactgggttgcggcccaggcacgagcgtgagagcgcgcggcgaactgatcctgcatctcgcggctaataccgtgcagacgcgccagcatctccgcagtcagccccatcatccctgccgcctttgccacgttgcggctgaggcccggatggaaatcgacgccatggctcattggcacatggcccatgtgctcgacgccgccaatcaggcagacgccggcatcgccggtcatgatcatacgggccgcatcgtgcagcgcctgcatggaagaaccgcacagacggttgaccgtatttgctggtaccgaatgcgggatctccgccagcagcgccgcgtttcgggcgatgttaaaaccctgctcgagggtttgctgcacgcaaccccagtagatatcgtctatcgcgcttgcctcaagcgacggattgcgcgacagcaggctacgcatcaggtgcgcggagaggtcttccgcgcgcacgtggcgaaatgcgccgcccttcgaacggcccatcggggtgcgaattgcatcgacaatgacaacctgttccattgtgactccttaagccgttttcagagcgccaaccggacgggctggctctacctggggataatacgcttcgttatggcgcgctttgtcacgcagaccggctggcacttcatacagcgggccaaggtgctggtattgctgcgccatatcgagatacttcgcgctgccgatggtgtccagccagcggaatgcgccgccgtggaatggagggaagcccaggccgtataccagcgccatatccgcttccgccgggctggcgataatgccttcttccaggcagcggacgacttcgttaaccatggggatcatcatgcgggcgataatctcttcatcgctgaaatcgcgcttcggctggctgacgtcggccagcaggctgtcgacggcagcatcttcttctttcttcggcttacctttgctgtcgtctttatagcgccagaagccgaggccgttcttctggccgaaacggttggcgtcaaacagggcgtcgatggcgtcgcgataatctttctgcatccgctgcgggaagcccgccgccatgaccgcctgagcatggtgcgcggtatcgatgccgaccacgtccagcagataagccgggcccatcggccagccaaactgtttctccatcactttgtcgactttgcggaagtccgccccgtcgcgcagcagctggctgaagccggcgaagtaggggaacagtacccggttgacgaagaagccgggacaatcattcaccacaatcggcgttttgcccattttgctggcccaggccaccactttggcaatggtattatccgaggttttttcgccgcggatcacttcaaccagcggcatgcgatgcaccgggttaaagaagtgcataccgcagaagttttccgggcgctgcagaacgctggccagctcgctgatggggatcgttgaggtgttggacgccagcacggtatccgggcgcacttttgactcggtttccgctagtacggctttcttcactttcgggttttccaccaccgcttcaacgacgacgtccacgcggtcaaaaccgctgtattccagcgttggctgaatggtgctaatcactccggccagcttcagaccgtcgattttgccgcgttccagctgtttattcagcagtttcgccgcttcggtcatacccagggtcagcgatttgtcgctgatgtctttcatcaccaccggcacgcccttccaggccgactggtaagcgataccgccgcccataatgccagcgcccaggacggcagcatgcttcggcgtctcgacatctttggtcagctttttcgctttcgctttgacgtactggtcgttcaggaagataccaaccagcgcgcgggcctcattggtatgggccagcgggacaaagcttttattttccagcaccagggcttcttcacgaccaagacgcgcggcggcttcaatggttttgaccgcggtgatcggcgccgggtaatgcttcccggcggtttgcgcgaccatgcctttggcaatcgtgaagctcatggcggcttcaattttgctgagcttcagcggctccagcttcggctgacgtttcgctttccagtccaggtcgccattcatggcctgacgtaggatcgccagcgcgccgtcgcgtagtttttccgcagcgaccacgccatccaccaggccgattttcagtgcttgatcggcgccgacgtctttcccggcggcaataatttccagcgcgctatcggcgccgagcaggcgcggcagacgcacggaaccgccgaagccgggcataatgccgagcttggtttccggcagcccaatgcgcagatccggcgtcgccaggcggtaatcggtcgccagcacgcattcgcaaccgccgcccagcgcatagccattgacggcagagattgtggggacggggagatcttccagacgattgaagacgctgttagcaaaatgcagccactggcttaactgctcctcagggaccaggaacagcgagaggaattcggtgatatccgcgccgacgataaatgccgctttttcagagcgcagcagcagacctttgagatcgctttgtttttccagtacgtccagcgcatgaccgaggctggctacggttgcggtatcaagcttgttgaccgaacctggggcatcgaacaccagttcggcgatgccatcttccagccagtcgaggtacagggtgtcgcctttgtagagcatgtcagtctcctgaatccagcaatatgatctggtcataccagatgaaacggagtgtggaatttatgttaaagaattgcaaattagtctttaaataattgctggtcggatcacatccggcggaaatcacccgcacgcaggtcgatgtgctaagatgcggtgtatcacgatcccataaaagcaaaggataaaagatggaatccctggccgcgctctataaaaatcatattgttaccctacaagaacgtacccgcgacgtcctggcccgttttcaaatggatgctctgctgattcactccggcgagctggttaacgtcttccttgatgaccatccgtacccgttcaaggtcaatccgcagttcaaagcctgggtgcctgtgactcaggtgcctaactgctggctgctggtggacggtgtgaataaaccgaagctgtggttctatctgccggtagattactggcataacgttgagccgttgccgacctctttctggaccgaagagatagacgtgatcgcgctaccgaaggccgatggcatcggcagccagctgcctgccgctcgcggtaatattggatatatcggcccggtgcctgagcgcgcgctgggcctgggtatcgccgcggataagatcaacccgaaaggggttatcgactacctgcattactaccgggcttacaaaaccgattacgagctggcctgcatgcgtgaagcgcagaagtcggcggtgaatggtcatcgtgcggcctacgaagctttccagtcggggatgagcgaattcgatatcaaccaggcctatctcaccgccaccggccatcgtgataccgacgtgccttacagcaatattgtcgcgctgaatgagcatgcctccgtcctgcactacaccaaactggaccatcgtgccccggcggagatgcgcagtttcctgctcgacgccggtgcggaatataacggctatgccgcagatctgacgcgcacctgggcggcgcacggcgataacgactttgcccatctgatcaaagacgttaacgatgagcagctggcgctgattagtaccatgaaggccggtaccagttacattgattaccatatccagttccatcagcgtatcgcgaagctgttgcgtaaacaccagttggttaccgacatgagcgaagaggcgatggtggagaatgacctgaccgggccgtttatgccgcacgggattggccatccgctgggtctgcaggtgcatgatgtcgctggctttatgcaggatgacaccggtacgcatctggcggcgccgtcgaaatacccgtatctgcgctgcacccgtattatcgagccgcggatggtgttaactattgaacccggcatctacttcatcgagtcgttactggcgccgtggcgtgaaggcccgttcagcaagcactttaactggcaaaaaattgacgccatgaagccgttcggtgggatccgtatcgaagataacgtggtgattcacgaaaacagtatcgaaaatatgacgcgcgatctgaagctggcctgatggagagctggttaatcccggcagcgccggttaccgtcgttgaggagattaaaaaaagccgttttatcacgctgttggcgcataccgacggcgtggcggcggcaaaagcttttgtcgagtccgtcagagcggatcaccctgatgcccgccaccactgcgtggcgtgggtcgcggggccgcctgatgattcgcaacagctggggttttcagacgatggcgaaccggcgggaacggcgggtaaaccgatgctggcgcagctgatgggaagcggcgtcggcgagataaccgctgtcgtcgtgcgttactacggtggtatcctgctgggcaccggcggtctggttaaggcctatggcggcggggtgcatcaggcgctggcgcagctgacgacgctgcgcaagacgccgttaacggcatatactttgcagtgtgagtatgggcaactggccggcgtcgaagcgctgctcgcccaattctccgggaacgtcgttgaaagcgaatatctggcgtcagttcggctgcgcgtggcgcttccccaggccgaagtggcggctttttcagcaagactggctgattttagtcgtggttcattgcaattactgaagattaacgaataatcccctctgttttttgcctatcaaaggaagcgccagagatgcattttcgcgccataacccgaatcgttggactgctggtcatcttgttttcggggacgatgatcgtcccgggattagtggccctgatatatcgcgatggcgcgggacgggccttcactcaaaccttctttgtcgctctggcgatcggctccatgctgtggtggccgaaccgtaagcaaaaaggcgaactgaaatctcgtgaagggtttctgatcgtggtgctgttctggaccgtgctggggagcgtgggggccttgccctttatcttctccgaacagccgaacctgacggtgacggatgccttcttcgagtcattttccggcctgacgacgaccggggcgaccactctggtggggctggactcgcttccgcacgctatcctcttttatcgccagatgctgcagtggttcggcggcatggggatcattgtgctggcggtagcgattctgcctatcctcggcgtcggggggatgcagctctaccgcgcggaaatgcccggcccgctgaaggataacaagatgcgtccgcgtattgccgagacggcgaagacattgtggctcatctatgtgttactcacgatcgcctgcgcattggcgctctggtttgccggtatgccggcgttcgatgcgatcgggcacagtttcgccaccatcgccatcggcggtttctcgactcacgatgccagcgtcggctatttcaacagcccgatgatcaactccatcattgccatcttcctgctgatctccggctgtaactacggtctgcatttttcgttgttgagcggacgcagcctgaaggtgtactggcgcgaccctgaatttaggatgttcattggcgtccagttgacgctggtcatcgtctgtacgctggtgctatggcttcataacgtgtacggctcggtgttgacgacgctgaaccaggcgtttttccaggtggtgtcgatggcgaccaccgcggggttcaccaccgatagcattgcacgctggccgctgttccttccggtgctgttgctgtgctccgcatttatcggcggctgcgctggctccacgggcggtggattaaaagtgatccgtatcctgttgctgttcaagcagggcaaccgtgagctgaagcggctggtgcacccgaatgcggtgtatagcattaaattaggtaaccgcgcgctgccggaacgtattctggaagcggtatggggattcttctccgcctatgcgctggtctttatcattagtatgctggcgattatcgccaccggggtggatgacttctctgctttcgcctccgtggtggcgacattgaacaacctcgggcctgggctcggcgtcgtcgcggataactttgccaccatgaacccggtcgcgaaatggatcctgattgctaatatgctgtttggtcgtctggaagtgttcaccttactggtgctctttacccccactttctggcgcgaataacaggagtgctcgtgaaaactttaattctcttctccacccgcgacgggcagacccgtgaaatcgcttcgtttctcgcctctgagcttaaagagctgggcatcgatgcggacaccctgaatctgaaccgtaccgatgtcgtcgaatggcatcactacgatcgggtggtcattggcgcgtcgattcgctatgggcactttcatccggcggtggaccgctttgtgaaaaagcatctggcagcattgcaggcgctgccgggggcattcttttcggttaacctggtggcgcgtaaacccgagaagcgcacgccgcagaccaacagctatacgcgtaagtttctgctgaactcgccgtggcagccgcagagctgcgcggtatttgccggcgcgctgcgctacccgcgctacagctggtacgatcggtttatgatccgcctgattatgaaaatgaccgggggtgaaacggatacccgcaaagaagtggtctataccgactggcaacaggtatcccggtttgctcgggaaatcgcacaaatggcgcgcaaatagcgcgtaaaactcgcgttgtgatggaaaatcgagcgaacgaaaagtttttttgcatttccccttgccacctcagaattactccctataatgcgcctccactgacacggaacaacggcaaacaagccgccgggtcagcggggttccggtgagaacctcgcagagaaaagcaaaaataaatgcttgactctgcagcgggaaagcgtaatatgcacaccccgcgccgcagcgaaaacgaagcggcactgctctttaacaatttatcagacaatctgtgtgggcactcaaagtgacatggattcttaacgtcctcggacgaaaaatgaataccaagtctcaagagtgaacacgtaattcattacgaagtttaattctttgagcatcaaacttaaattgaagagtttgatcatggctcagattgaacgctggcggcaggcctaacacatgcaagtcgagcggtagcacagagagcttgctctcgggtgacgagcggcggacgggtgagtaatgtctgggaaactgcctgatggagggggataactactggaaacggtagctaataccgcataatgtcgcaagaccaaagtgggggaccttcgggcctcatgccatcagatgtgcccagatgggattagctagtaggtggggtaacggctcacctaggcgacgatccctagctggtctgagaggatgaccagccacactggaactgagacacggtccagactcctacgggaggcagcagtggggaatattgcacaatgggcgcaagcctgatgcagccatgccgcgtgtgtgaagaaggccttcgggttgtaaagcactttcagcggggaggaaggcggtgaggttaataacctcatcgattgacgttacccgcagaagaagcaccggctaactccgtgccagcagccgcggtaatacggagggtgcaagcgttaatcggaattactgggcgtaaagcgcacgcaggcggtctgtcaagtcggatgtgaaatccccgggctcaacctgggaactgcattcgaaactggcaggctagagtcttgtagaggggggtagaattccaggtgtagcggtgaaatgcgtagagatctggaggaataccggtggcgaaggcggccccctggacaaagactgacgctcaggtgcgaaagcgtggggagcaaacaggattagataccctggtagtccacgccgtaaacgatgtcgatttggaggttgtgcccttgaggcgtggcttccggagctaacgcgttaaatcgaccgcctggggagtacggccgcaaggttaaaactcaaatgaattgacgggggcccgcacaagcggtggagcatgtggtttaattcgatgcaacgcgaagaaccttacctggtcttgacatccacagaacttagcagagatgctttggtgccttcgggaactgtgagacaggtgctgcatggctgtcgtcagctcgtgttgtgaaatgttgggttaagtcccgcaacgagcgcaacccttatcctttgttgccagcggttaggccgggaactcaaaggagactgccagtgataaactggaggaaggtggggatgacgtcaagtcatcatggcccttacgaccagggctacacacgtgctacaatggcatatacaaagagaagcgacctcgcgagagcaagcggacctcataaagtatgtcgtagtccggattggagtctgcaactcgactccatgaagtcggaatcgctagtaatcgtagatcagaatgctacggtgaatacgttcccgggccttgtacacaccgcccgtcacaccatgggagtgggttgcaaaagaagtaggtagcttaaccttcgggagggcgcttaccactttgtgattcatgactggggtgaagtcgtaacaaggtaaccgtaggggaacctgcggttggatcacctccttaccttaaagaacctgcctttgcagtgctcacacagattgtctgatgaaaacagcagtaaaaacctctacaggcttgtagctcaggtggttagagcgcacccctgataagggtgaggtcggtggttcaagtccactcaggcctaccaaatttgcgaagcaaatttgaagaggttgcaaacgatggggctatagctcagctgggagagcgcctgctttgcacgcaggaggtctgcggttcgatcccgcatagctccaccatctttactgcgaacacaagaaaacttcagagtgaacctgaaaaggtgcactgcgaagttttgctctttaaaaatctggatcaagctgaaaattgaaacgacacacagtcaatgtgtgttcgagtatctcaaattttcgcaatcagaagtgaaacatcttcgggttgtgaggttaagcgactaagcgtacacggtggatgccctggcagtcagaggcgatgaaggacgtgctaatctgcgaaaagcgtcggtaaggtgatatgaaccgttataaccggcgatgtccgaatggggaaacccagtgcaattcgttgcactatcgttaactgaatacataggttaacgaggcgaaccgggggaactgaaacatctaagtaccccgaggaaaagaaatcaaccgagattcccccagtagcggcgagcgaacggggagcagcccagagtctgaatcagcttgtgtgttagtggaacggtctggaaagtccgacggtacagggtgatagtcccgtacaccaaaatgcacaggctgtgaactcgaagagtagggcgggacacgtggtatcctgtctgaatatggggggaccatcctccaaggctaaatactcctgactgaccgatagtgaaccagtaccgtgagggaaaggcgaaaagaaccccggcgaggggagtgaaaaagaacctgaaaccgtgtacgtacaagcagtgggagcaccttcgggtgtgactgcgtaccttttgtataatgggtcagcgacttatattctgtagcaaggttaaccgtataggggagccgcagggaaaccgagtcttaactgggcgttaagttgcagggtatagacccgaaacccggtgatctagccatgggcaggttgaaggttgggtaacactaactggaggaccgaaccgactaatgttgaaaaattagcggatgacttgtggctgggggtgaaaggccaatcaaaccgggagatagctggttctccccgaaagctatttaggtagcgcctcgtgaactcatcttcgggggtagagcactgtttcggctagggggtcatcccgacttaccaacccgatgcaaactacgaataccgaagaatgttatcacgggagacacacggcgggtgctaacgtccgtcgtgaagagggaaacaacccagaccgccagctaaggtcccaaagtcatggttaagtgggaaacgatgtgggaaggcacagacagccaggatgttggcttagaagcagccatcatttaaagaaagcgtaatagctcactggtcgagtcggcctgcgcggaagatgtaacggggctaaaccatgcaccgaagctgcggcagcgacactatgtgttgttgggtaggggagcgttctgtaagcctgcgaaggtgtgctgtgaggcatgctggaggtatcagaagtgcgaatgctgacataagtaacgataaagcgggtgaaaagcccgctcgccggaagaccaagggttcctgtccaacgttaatcggggcagggtgagtcgacccctaaggcgaggccgaaaggcgtagtcgatgggaaacaggttaatattcctgtacttggtgttactgcgaaggggggacggagaaggctatgttagccgggcgacggttgtcccggtttaagcatgtaggctggttgtccaggcaaatccggataatcaaggctgaggtgtgatgacgaggcactacggtgctgaagtaacaaatgccctgcttccaggaaaagcctctaagcatcaggtaacatcaaatcgtaccccaaaccgacacaggtggtcaggtagagaataccaaggcgcttgagagaactcgggtgaaggaactaggcaaaatggtgccgtaacttcgggagaaggcacgctggtgtgtaggtgaagcccctgcgggtggagctgagaccagtcgaagataccagctggctgcaactgtttattaaaaacacagcactgtgcaaacacgaaagtggacgtatacggtgtgacgcctgcccggtgccggaaggttaattgatggggttatccgtaaggagaagctcttgatcgaagccccggtaaacggcggccgtaactataacggtcctaaggtagcgaaattccttgtcgggtaagttccgacctgcacgaatggcgtaatgatggccaggctgtctccacccgagactcagtgaaattgaactcgctgtgaagatgcagtgtacccgcggcaagacggaaagaccccgtgaacctttactatagcttgacactgaacattgagccttgatgtgtaggataggtgggaggctttgaagcgtggacgccagtctgcgtggagccaaccttgaaataccaccctttaatgtttgatgttctaacgttggcccctgaccggggttgcggacagtgtctggtgggtagtttgactggggcggtctcctcccaaagcgtaacggaggagcacgaaggttagctaatcctggtcggacatcaggaggttagtgcaatggcataagctagcttgactgcgagcgtgacggcgcgagcaggtgcgaaagcaggtcatagtgatccggtggttctgaatggaagggccatcgctcaacggataaaaggtactccggggataacaggctgataccgcccaagagttcatatcgacggcggtgtttggcacctcgatgtcggctcatcacatcctggggctgaagtaggtcccaagggtatggctgttcgccatttaaagtggtacgcgagctgggtttagaacgtcgtgagacagttcggtccctatctgccgtgggcgctggagaatagaggggggctgctcctagtacgagaggaccggagtggacgcatcactggtgttcgggttgtcatgccaatggcactgcccggtagctaaatgcggaagagataagtgctgaaagcatctaagcacgaaacttgccccgagatgagttctccctgagactataagtctcctgaaggaacgttaaagacgatgacgttgataggccgggtgtgtaagcgcagcgatgcgttgagctaaccggtactaatgaaccgtgaggcttaaccttacaacgccgaagatgttttggcgatttgagagaattttcagctctgatacagattaatcgatacgttggtgagacgtgttgataaaacagaatttgcctggcggcactagcgcggtggtcccacctgaccccatgccgaactcagaagtgaaacgccgtagcgccgatggtagtgtggggtctccccatgtgagagtagggaactgccaggcatcaaataaagcagaaagcccggtcgaaagaccgggctttttgttttatctgttgtttgtcggtgagcgctctccagagtaggacaaatccgccgggagcggatttgaacgttgcgcagcaacggcccggagggtggcgggcaggacgcccgccataaactgccaggcatcaaacaagtgaagagcccatcctgtcggatgggctttttgcgtttctgtcgtccggccagcgtgccggtatgtctccccggtggcgctgcgcttaccggggctacgggcctgtcgcgttctgtagcccgcaccggtacaccacatcaccaccggtaacgccccgcaatatcattgcccctgtaatcagacaagccttcccccgccagatacgataaactaacgccgattttgcatcaggaagccactatgaaccactccctcaaaccctggaatacctttggcattgaacgcttcgccaagacgatagtacgcgccgaaactgagcaacagttgctaagcgcctggcaaaccgctgccgcggcaggcgaacccacgctgatccttggggaaggcagtaatgtcctgtttctgaacgactatgccggtacggtgatcctcaaccggattatggggatcgaggtgagcgaaacgccggaagcctggcgcttgcacgtcggcgccggcgaaaactggcatcagttggtgcagttcacgctacagcatgcgatgccaggtctggaaaatctggcgttaatccctggctgcgcaggatcttcgccgatccagaatattggcgcctacggcgttgagctacagcgggtttgcgaatatgttgactgcattgagctggaaaccgggcgtaagcaacgtctttcagccgcggaatgccgttttggctatcgcgacagtatcttcaaacatgaatatcaggaccgctatgccatcgtcgcgattggcttatcgttagcgaaaacatggcagcctgtactgagttacggtgatttaacgcgtctcgatccgcagaccgtcacgccgcagcaggtatttgatgcggtctgtcatatgcgaatgactaaattgccggatccaaagattaacggtaatgccggcagcttttttaagaatccgatcgtcagcgctcaggttgcggaagcgctgctggcgcagttccctcatgcaccgcactatccgcaggcaaatggcagcgtcaagctggccgctggctggctaatcgatcaatgtgagctcaaaggacaacgcatcggcggcgcggccgtccatcgacagcaggcgctggtactgattaatgaagatcgagcgaccagcgaggatgtggtgaaacttgctcattatgttcgccagcgggtgggtacgaaattcgatgtatggcttcagcccgaggtgcgcttcattggcacgcatggtgaagtcaacgcagaggagagcattgcgtgaaagaccatactatccctttaacgctaatttctatccttgctgatggtgagtttcactctggcgaacagcttggtgagcagttaggcatgagccgggcggcgattaataagcacatccagaccttacgtgactggggcgtcgatgtgtttactgtgccgggcaagggttacagcctgccggagcctattcatctattagatgagaaaaagatttctcaagagatagaccatggccgagtgacggtccttcccgtcatcgactctactaaccagtatttgctggacaggcttgatgagctgacgtccggagatgcctgtgtggctgaatatcagcaagcagggcgaggccggcgaggcagaaaatggttttcgccctttggcgcgaatctctatctctcgatgtactggcgtctggagcagggcccggcagcggctattggtctaagcctggtgatcggtattgtgatcgctgaagttctgcagcagctcggggccgaacaggttcgcgtgaaatggccaaacgatatttacctgcaggatcgtaagctgtcagggatcctcgtggaactgacggggaaaacgggcgatgccgcacaaatcgtcagcggcgcgggtatcaaccttgtgatgcgtcgcgtggagtctgatgtcgtcaatcaggggtggatcagccttcaggaagcgggggtggtcatcgaccgtaacctcctcgccgcgcgcctgattaaagagctgcgcctgggactggagctgttcgagcaggaaggattggctccctatctaccgcgctgggaaaaactggataactttattcatcgcccggtgaaactgattatcggtgataaagaaatttacggcatttcgcgtggcattgacgcccagggcgcactattgctggagcaggatggtgtaataaaagcctgggtgggtggtgaaatatcattgcgcagtgcagaataaaaaagggagcttcggctcccttattttatttacgtaagcgtacctgattcactgagtgattggcgctcttagtcatgatcaggctagcgcgctcgcgagttggaaggatattttctttaagattcattaggttgatttcattccatagcgaagtggcaatatctaccgcttcttccttcgagagcttagcgtaattatggaaataggaatccggatcggtaaacgccccttcccggaatttaagaaagcggttgatataccagcttttcaataattcttccggggcatcgacataaatagaaaagtcgacaaaatcggaaacgaatacatgatggggatcgtgcggataatccattccactttgcagaacattcagcccttcaagaattaaaatatccggttgcgcgacggttttgtcaccattgggaataacatcataaatcagatgggaataaactggcgcggttgcctgcggtacccctgatttgagatcggagacaaacttcaccaggcgatgcatatcataggactgcggaaagccttttttcttcattaacccacgttcttttaaaaccgagttagggtgcaaaaaaccgtcggtggtaatgagttcgacatggcgatgctccggccaacgactaagcaaagcttgcagaacgcgggcggtggtgctttttcctaccgcaacgctgccagcgatactgataatatagggaattcgctgaccattggtgccaagaaattgttcgagaacagcctggcgacgcaggttagaactgatatagaagttgagcaaacgcgacagcggcaaatagatctcggcaacctcttccagagagagatcttcgttgatgccttttaaccgcgtgatttcttcctcggttaacgtcatcgggacagaatcacgaagtgcagcccattggtggcggttaaattgtaggtacggtgtcattaacgtctgctctttttggctcataagcatgttcttactatcaccgaataccttgaaacggtgatgcttcacacgagttaatcaggacaatgggcaggagggtaacaccagattgccgggaataataagaaaaaaactcattgaatgctgctttctcgcgccagcatcacaagagaagaataagtttcttattctttgcaaagcatggcctttgctaacaggctaggctagcggcctgaatcctttccgtcagcggtcagcatgcgatagaggtaaccggagatgatcggacagcgcctgaagcgccgaattattggcgaatatttgcacttcgctgcttgaaattacaccgttttttcgcgtaagagcacaaaatgtgagcaagagaacgttttatgcaaatttttagttgcatgaactcgctcctctccctagaatgcgcgctacttgatgccgacttagctcagtaggtagagcaactgacttgtaatcagtaggtcaccagttcgattccggtagtcggcaccataacaatttgggtggggttcccgagcggccaaagggagcagactgtaaatctgccgtcatcgacttcgaaggttcgaatccttcccccaccaccactttctggcgacgctttgcggagccggagttggttgggtaaactaatcagctcaatactaaagagagcagtctctttagtattacagaaagaactgggtagccgagtttcaggatgcgggcatcgtataatggctattacctcagccttccaagctgatgatgcgggttcgattcccgctgcccgctccagacgtgctgatatggctcagttggtagagcgcacccttggtaagggtgaggtccccagttcgactctgggtatcagcaccacttcttttctctccttccctgtttctcttctgttatgttcattcaacaagtcgggcatgttgcctggttgatgtggtgatatcaccgatttatccgtgtcttagagggacaatcgatgtctaaagaaaagtttgaacgtacaaaaccgcacgttaacgtcggtactatcggccacgttgaccatggtaaaacaacgctgaccgctgccatcactaccgtactggctaaaacctacggtggttccgctcgcgcattcgaccagatcgataacgcgccggaagaaaaagctcgtggtatcaccatcaacacctctcacgttgaatatgacaccccgactcgccactacgcgcacgtagactgcccgggccacgccgactatgttaaaaacatgatcaccggtgctgcgcagatggacggcgcgatcctggttgttgctgcgactgacggcccgatgccgcagactcgtgagcacatcctgctgggtcgtcaggtaggcgttccgtacatcatcgtgttcctgaacaaatgcgacatggttgatgacgaagagctgctggaactggttgagatggaagttcgtgaactgctgtctcagtacgatttcccgggcgacgacactccgatcgttcgtggttctgctctgaaagcgctggaaggcgacgcagagtgggaagcgaaaatcatcgaactggctggccacctggatacctatatcccggaaccagagcgtgcgattgacaagccgttcctgctgccgatcgaagacgtattctccatctccggtcgtggtaccgttgttaccggtcgtgtagagcgcggtatcatcaaagtaggtgaagaagttgaaatcgttggtatcaaagaaaccgcgaaaaccacctgtactggcgttgaaatgttccgcaaactgctggacgaaggccgtgctggtgagaacgtaggtgttctgctgcgtggtatcaaacgtgaagaaatcgaacgtggtcaggtactggctaagccgggcaccatcaacccgcacaccaagttcgaatctgaagtgtacatcctgtccaaagacgaaggcggccgtcatactccgttcttcaaaggctaccgtccgcagttctacttccgtactactgacgtgactggcaccatcgaactgccggaaggcgtagagatggtaatgccgggcgacaacatcaaaatggttgttaccctgatccacccgatcgcgatggacgacggtctgcgtttcgcaatccgtgaaggcggtcgtaccgttggcgcgggcgtggttgctaaagttctcggctaatcgctgataacatttgacgcaatgcgcaataaaagggcatcatttgatgccctttttgcacgctttcacaccagaacctggctcatcagtgattttatttgtcataatcattgctgagacaggctctgaagagggcgtttatacaccaaaccattcgagcctcagggcgacggctaatcaactccttctttgcaacagcagggcaggggtgacaccaccgtcaacattgaagcaatttgaatagttaagtgtataatccgaaacttaatttcggtttggatcgcctcgcccccgcggggtgaaattgtttgtagaatacttctgacaggttggtttatgagtgcgaataccgaagctcaagggagcgggcgcggcctggaagcgatgaagtggattatcgttgccgtgctgctgatcgtggcgatcgtgggcaacttcctttatcgtgacattatgctggcggtgcgtgcgctggccgtggttattcttattgctgctgccggtggcgtcgcgctgttgacgacgaaaggtaaggcgaccgttgcttttgctcgcgaagcgagaaccgaagttcgtaaagtgatttggccgactcgccaggaaacgctgcatactacgctgattgttgctgccgtgactgcagtaatgtcactgatcctgtggggactggatggtattctggttcgcctggtctcctttatcactggcctgaggttctgagatgtctgaagctcctaaaaagcgctggtacgtcgttcaggcgttttccggttttgaaggtcgcgtagccacgtcgctgcgtgaacatatcaaattacacaacatggaagagttatttggcgaagtcatggtcccgaccgaagaagtggttgagatccgtggcggccagcgtcgcaaaagcgaacgtaaattcttcccgggctatgtcctggttcagatggtcatgaacgacgcaagctggcacctggtgcgcagcgtaccgcgcgtgatgggcttcatcggcggcacctctgaccgtccggcgccgatcagcgacaaagaagtcgacgccatcatgaatcgtctgcagcaggttggcgataagccgcgtccgaaaacgctgtttgaaccgggtgaaatggttcgcgttaacgacggtccgttcgctgactttaacggcgtggtggaagaagtggactatgagaagtcccgcctgaaagtttccgtttctatcttcggtcgtgcgaccccggtagaactggacttcagccaggttgagaaggcgtaagccggcgatcaaaaaagcagcgatttaatcgttgcatagggcgcgaaattggcatacaatttcgcgccttttgtttttatgggcccggcccgtaaaacgatgtttaatcacggggagcttctctgaagcgttaatacccattttgaggatttaagaatggctaagaaagtccaagcctacgtcaagctgcaggttgcagctggtatggcgaacccgagcccgccggtcggcccagcactgggtcagcagggcgtgaacatcatggaattctgcaaagcgttcaacgccaaaactgattccctggagaaaggtctgccgatcccggttgttatcaccgtttacgctgaccgttcctttacctttgttaccaagactccgccggctgctgttctgctgaagaaagctgcaggcatcaagtctggctccggtaagccgaacaaagataaagtgggtaaaatctcccgcgctcagctgcaggaaatcgcgcagaccaaagctgccgacatgactggtgccgacattgaagcgatgactcgctccatcgaaggtactgcacgttccatgggcctggtagtggaggactaagaaatggctaaactgaccaagcgcatgcgcgtgatccgtgagaaagttgatgcaactaaacagtacgacatcaacgaagccattgctctgctgaaagagctggccaccgctaaatttaccgaaagcgtagacgttgccgttaacctcggcatcgacgctcgtaaatctgaccagaacgtccgtggcgcaactgtactgccgcacggtactggccgttccgttcgcgtagccgtatttacccagggcgcaaacgctgaagctgctaaagctgcaggcgctgagctggtaggtatggaagatctggctgagcagatcaaaaaaggcgaaatgaactttgacgttgttattgcttccccggatgcaatgcgcgttgttggccagctgggccaggttctgggtccgcgtggcctgatgccgaacccgaaagtaggtaccgtaactccgaacgttgctgaagcggttaaaaacgcgaaagcaggccaggttcgttaccgtaacgacaaaaacggcatcatccacaccaccatcggtaaagtggactttgacgctgacaaactgaaagaaaacctggaagctctgctggttgcgctgaaaaaagcaaaaccgactcaggcgaaaggcgtgtacatcaagaaagttagcatctccaccactatgggtgcaggtgttgcagtagatcaggctggcctgaacgcttctgcaaactaatgcctttacgtgggcggtgattttgtctacaatcttacccccacgattctgtcaataagacagacgctatgcgagtcatttgaattgcagcaaggcagcaatcgagtgaatcaccgggagtgtagttaactacatgaccggtgtgaacgagagcagctaacgccgctgcgattcgaaggacgaagtcataggaagaatttgttcgttggagcctggcctatccaggcctccgtcgaagaccgcaggtgtttcgcaagaaacttaatcccctgcgtagacggtgacagaacgctaagattatttttggatattctggcttgtttctgctcaccgtatttagacgctcttttcgttgaattgagtgaagtgagttccagagcataggctctggcaaacatccaggagcaaagctaatggctttaaatcttcaagacaaacaagcgattgttgctgaagtcagcgaagtagccaaaggcgcgctgtctgcagtagttgcggattcccgtggcgtaactgtagataaaatgactgaactgcgtaaagcaggtcgtgaagctggcgtatacatgcgtgttgttcgtaacaccctgctgcgccgcgtcgttgaaggtactcagttcgagtgcctgaaagacacgtttgttggtccgaccctgattgcatactctatggaacacccgggcgctgctgctcgtctgttcaaagagttcgcgaaagcgaatgcaaaatttgaggtcaaagccgctgcctttgaaggtgagctgatcccggcgtcgcagatcgaccgcctggcaactctgccgacctacgaagaagcaattgcacgcctgatggcaaccatgaaagaagcttcggctggcaaactggttcgtactctggctgctgtacgcgatgcgaaagaagctgcttaatcgcagttatctttgtaaagcattcgcttacgtataaacttattctgatattcaggaacaatttaaatgtctatcactaaagatcaaatcattgaagcagtatccgctatgtccgtaatggacgttgttgagctgatctctgcaatggaagaaaaattcggtgtttccgctgctgctgctgtagctgtagctgctggcccggttgaagctgctgaagaaaaaactgaattcgacgtaattctgaaagctgctggcgctaacaaagttgctgttatcaaagcagtacgtggcgcaactggcctgggtctgaaagaagctaaagacctggtagaatctgctccggctgcactgaaagaaggcatcagcaaagacgacgctgaagctctgaaaaaatctctggaagaagctggcgctgaagttgaagttaaataagccaacccttccggttgcagcctgagaaatcaggctgaggctggtgactttttggtcaccagcctttttgcgctgtaaggcgccagtagcgtttcacgctgtttgactactggtttgcctctcaatgcttgtttctatcgacgacttaatatactgcgacaggttagggttcctgggctgtgtaaatcgcaatgaaatggtttaagcgtgatagcaacaggcattgcggaaagtgttccattttccggtcaacaaaatagtgttgcataaaaaactgccctctgcgggcagatgggtcgacttgtcagcgagctgaggaaccctatggtttactcctataccgagaaaaaacgtattcgtaaggattttggtaaacgtccacaagttctggatgtgccatatctcctttctatccagcttgactcgttccagaagtttatcgagcaagatcctgaagggcagtatggtctggaagctgctttccgttccgtattcccgattcagagctacagcggtaattccgagctgcaatacgtcagctaccgtctgggcgaaccggtttttgacgttaaagaatgtcagatccgtggcgtgacttattctgcaccgctgcgcgtaaaactgcgtctggtgatctacgagcgcgaagcgccagaaggcaccgtcaaagacattaaagaacaagaagtctacatgggcgaaattccgctcatgaccgacaacggtacctttgttatcaacggtaccgagcgtgttatcgtttctcagctgcaccgtagcccgggcgtcttctttgacagtgacaaaggtaagacccactcctccggtaaggttctgtataacgcacgtatcatcccttaccgcggttcctggctggacttcgaattcgacccgaaagacaacctgttcgttcgtatcgaccgtcgtcgtaagctgccggctaccatcatcctgcgcgcgctgaattacaccactgagcagatccttgacctgttcttcgaaaaagtggtctttgaaattcgcgacaacaagctgcagatggagctgattccggagcgtctgcgcggtgaaactgcctccttcgatatcgaagccaacggcaaagtgtacgttgagaaaggccgtcgcatcacggctcgtcatatccgtcagctggaaaaagacgatatcaagcatatcgaagtgccggttgaatatatcgcgggcaaagtggcggctaaagactatatcgatgaagcgactggcgaactgatctgcccggcgaacatggagctgagcctggatctgctggctaagctgagccagtctggccacaagcgtatcgaaacgctgttcaccaacgatctggaccacggcccgtacatctctgaaacggtacgcgtcgacccgactaacgatcgtctgagcgcgctggtagaaatctaccgcatgatgcgccctggcgagccgccgactcgtgaagccgctgaaagtctgtttgagaacctgttcttctctgaagaccgctacgatctgtccgcggttggtcgtatgaagttcaaccgttctctgctgcgcgacgaaatcgaaggttccggtatcctgagcaaagacgacatcatcgaagtgatgaagaagctcatcgatatccgtaacggtaaaggcgaagtggacgatatcgaccacctcggcaaccgtcgtatccgttccgttggcgaaatggcggaaaaccagttccgcgttggcctggtacgtgtagagcgtgcggtgaaagagcgtctgtctcttggcgatctggataccctgatgcctcaggatatgatcaacgccaagccgatttccgcagcagtgaaagagttctttggttccagccagctgtctcagtttatggaccagaacaacccgctgtctgagattacgcacaaacgtcgtatctccgcactcggcccaggcggtctgacccgtgagcgcgcaggcttcgaagttcgagacgtacacccgacccactacggtcgcgtatgtccgatcgaaacgcctgaaggtccaaacatcggtctgattaactccctgtccgtgtacgcgcagaccaacgaatatggcttccttgagacgccgtatcgtaaagtgaccgacggtgtggttactgacgaaattcactacctgtctgctatcgaagaaggcaactacgttatcgctcaggcgaactccaacctggatgaaaacggccacttcgtagaagatctggttacctgccgtagcaaaggcgaatccagcttgttcagccgcgaccaggttgactacatggacgtatccacccagcaggtggtatccgtcggtgcgtccctgatcccgttcctggaacacgatgacgccaaccgtgcattgatgggtgcgaacatgcaacgtcaggcggttccgactctgcgcgctgataagccgctggttggtaccggtatggaacgtgctgttgccgttgactccggtgttactgccgtggctaaacgtggcggtaccgttcagtacgtggatgcttcccgtatcgttatcaaagttaacgaagacgagatgtacccgggcgaagcaggtatcgacatctataacctgaccaagtacacccgttctaaccagaacacctgcatcaaccagatgccttgcgtgtccctgggcgaacctattgagcgcggcgacgtgctggcagacggcccgtccaccgacctcggtgagctggcgctgggtcagaacatgcgtgtagcgttcatgccgtggaacggttacaacttcgaagactccatcctcgtttccgagcgtgttgtccaggaagaccgtttcaccactatccacattcaggaactggcgtgcgtgtcccgtgacaccaagctggggccggaagagatcaccgctgacatcccgaacgtgggtgaagctgcgctctccaaactggatgaatccggtatcgtttatatcggtgcggaagtgaccggcggcgacattctggttggtaaggtaacgccgaaaggtgaaacccagctgacgccggaagagaaactgctgcgcgcgatcttcggtgagaaagcgtctgatgttaaagactcttctctgcgcgtaccgaacggtgtctctggtaccgttatcgacgttcaggtctttacccgtgacggcgtagaaaaagacaaacgtgctctggaaatcgaagagatgcagctgaagcaggccaaaaaagacctgtctgaagaactgcagatcctcgaagccggtctgttcagtcgtatctacgcggtgctggtctccggtggcgttgaagctgagaagctcgacaagctgcctcgcgatcgctggctggaactgggcctgaccgacgaagagaaacaaaatcagctggaacagctggctgagcagtatgacgaactgaaacacgagttcgagaaaaaactcgaagcgaaacgccgtaaaatcacccaaggcgacgatctggcaccgggcgtgctgaagattgttaaggtatatctggccgttaaacgccgtatccagcctggtgataagatggcaggtcgtcacggtaacaagggtgttatctctaagatcaacccgatcgaagatatgccgcacgatgctaacggtacgccggtagatatcgtactgaacccgctgggcgtaccgtctcgtatgaacatcggtcagatccttgaaactcacctgggtatggctgcaaaaggcatcggcgataagatcaacgccatgctgaagcagcagcaggaagtcgcgaaactgcgcgaattcatccagcgtgcttacgatctgggcgctgacgttcgccagaaagttgacctgaataccttcagcgatgaagaagttctgcgtctggctgaaaacctgcgtaaaggcatgccgatcgcaacgccggtattcgacggtgcgaaagaagctgaaatcaaagagctgctgcagctgggcgacctgccgacttccggtcagatcaccctgtttgatggccgcaccggtgaacagttcgaacgtccggtaaccgtgggttacatgtacatgctgaaactgaaccacctggtcgacgacaaaatgcacgctcgttccaccggttcttacagcctggttactcagcagccgctgggtggtaaggcacagttcggtggtcagcgcttcggtgagatggaagtgtgggcgctggaagcatacggcgcggcctacaccctgcaggaaatgctcaccgttaagtctgatgacgtgaacggtcgtaccaagatgtataaaaacatcgtggacggcaatcaccagatggaaccgggcatgccggaatccttcaacgtactgttgaaagaaattcgctcgctgggcatcaacatcgaactggaagacgagtaattctcgctcaaacaggtcactgctgccgggttaacgcccggcagcggaatgtgctaactccgacgggagcaaatccgtgaaagacttattaaagtttctgaaagcgcaaactaaaaccgaagagtttgatgcgatcaaaattgctctggcttcgccagacatgatccgttcatggtctttcggtgaagttaaaaagccggaaaccattaactaccgtacgttcaagcctgagcgtgacggccttttctgcgcccgtatctttgggccggtaaaagattatgagtgcctgtgcggtaagtacaagcgcctgaaacaccgcggtgtgatctgtgagaagtgcggcgttgaagtgacccagactaaagtgcgtcgtgagcgcatgggccacatcgagctggcatgtccgactgcgcacatctggttcctgaaatccctgccgtcccgtatcggtctgctgctggatatgccgctgcgcgatatcgaacgtgtactgtactttgaatcctatgtggttatcgaaggtggcatgaccaacctcgaacgcaaccagattctgacggaagaacagtacctggacgcgctggaagagttcggtgacgaattcgacgcgaaaatgggcgcggaagcgatccaggcgctgctgcgcaatatggatctggagcaggaatgcgagcagctgcgtgaagagctgaacgaaaccaactccgaaaccaagcgtaaaaagctgaccaagcgcattaagctgctggaagctttcgttcagtctggcaacaagccggagtggatgatcctgaccgttctgccggtactgccgccagatctgcgtccgctggttccgctggacggtggtcgtttcgcgacgtctgacctcaacgatctgtatcgtcgcgtgatcaaccgtaacaaccgtctgaaacgtctgctggatctggctgcgccggatatcatcgtacgcaacgaaaaacgtatgctgcaggaagcggttgacgccctgctggataacggtcgtcgcggtcgtgcgatcaccggttctaacaaacgtcctctgaaatctttggccgatatgatcaaaggtaaacagggtcgtttccgccagaacctgctcggtaaacgcgttgactactccggtcgttctgttatcaccgtaggtccatacctgcgtctgcatcagtgcggtctgccgaagaaaatggcgctggagctgttcaaaccgttcatctacggcaagctggaactgcgtggcctggccaccaccatcaaagccgctaagaagatggttgagcgcgaagaagctgtcgtttgggatatcctggacgaagttatccgcgaacacccggtcctgctgaaccgtgcgccaaccctgcaccgtctgggtattcaggcattcgaaccggttctgatcgaaggtaaagccatccagctgcacccgctggtttgtgcggcatacaacgccgacttcgatggtgaccagatggctgttcacgtaccgctgacgctggaagcccagctggaagcgcgtgcgctgatgatgtctaccaacaacatcctgtccccggcgaacggcgaaccaatcatcgttccgtctcaggacgttgtactgggtctgtactacatgacccgtgacagtgttaacgccaaaggcgaaggcatggtgctgactggcccgaaagaagctgagcgtatttatcgcgccggcctggcctctctgcatgcgcgcgttaaagtgcgtatcactgaatacgaaaaagacgacaatggtgagtttgtcgcgaaaaccagcctgaaagacacgaccgttggccgtgccattctgtggatgatcgtaccgaaaggtctgccgttctctatcgtgaaccaggcgcttggtaagaaagcgatctccaagatgctgaacacctgttaccgtattctgggtctgaaaccgaccgttatttttgcggaccagacgatgtacaccggctttgcttacgcagcgcgttcaggtgcatccgttggtatcgatgacatggtcatcccggagaaaaaatacgaaatcatcagcgaagcggaagcggaagttgctgagattcaggaacagttccagtccggtctggtgaccgcgggcgaacgctacaacaaagttatcgatatctgggctgcggcgaacgatcgtgtatccaaagcgatgatggataacctgcaaaccgaaaccgtgattaaccgtgacggtcaggaagagcagcaggtttccttcaacagcatctacatgatggccgactccggtgcgcgtggttctgcggcacagattcgtcagctggctggtatgcgtggtctgatggcgaagccggatggctccatcatcgaaacgccgatcaccgcgaacttccgtgaaggtctgaacgtactccagtacttcatctccacccacggtgctcgtaaaggtctggcggataccgcactgaaaacagcgaactccggttacctgactcgtcgtctggttgacgttgcgcaggacctggtcgtcactgaagacgactgcggcaccctggaaggcatcaccatgacgccggttatcgaaggtggcgacgttaaagagccgctgcgcgatcgcgtactgggtcgtgtgactgcggaagatgttctgaagccgggtaccgcggatattctggttccacgcaacacgctgctgcatgagcactggtgtgacctgctggaagcgaactccgttgactccgtcaaagtgcgttccgttgtatcctgtgacaccgactttggcgtctgcgcgcactgctatggtcgtgacctggcgcgtggccacctcatcaacaaaggtgaggctatcggcgttatcgcggcacagtccatcggtgagccgggtacacagctgacgatgcgtacgttccacatcggtggtgcggcatctcgtgcggctgctgaatccagcatccaggtgaaaaacaaaggtagcatcaagctcagcaacgcgaagtcggttgtgaactccagtggtaagctggttatcacttcccgtaataccgagctgaagctgatcgacgaattcggtcgtaccaaagagagctataaagtaccttacggtgcggttatggcgaaaggcgacggtgagcaggttgccggcggtgaaaccgtcgcaaactgggatccgcacaccatgccggttatcaccgaagttagcggtttcatccgtttcactgacatgatcgacggtcagaccattactcgtcagactgacgagctgaccggtctgtcttcgctggtggttctggactctgcagaacgtaccgcaggtggtaaagatctgcgtccagcactgaaaattgttgatgctcagggcaacgacgttctgatcccaggcactgatatgcctgctcagtacttcctgccgggtaaagcgattgttcagctggaagatggcgtacagatcagctcgggtgacaccctggcgcgtattccgcaggaatccggcggtaccaaggatatcaccggtggtctgccgcgcgttgcggacctgttcgaagcacgtcgtccgaaagagccggctatcctggctgaaatcagcggtatcatttccttcggtaaagaaaccaaagggaaacgtcgcctggttatcaccccggtagacggtagcgagccgtacgaagagatgatcccgaaatggcgtcagctcaacgtgttcgaaggtgaacgtgtggaacgtggtgatgtggtttccgacggtccggaagcaccgcacgacattctgcgtctgcgtggcgtacatgctgtgacccgttacattgttaacgaagtccaggacgtataccgtctgcagggcgttaagattaacgataagcacatcgaagttatcgttcgtcagatgctgcgtaaagccaccatcgaaagcgcaggcagctccgacttcctcgaaggcgagcaggtggaatactcccgcgtcaagatcgcgaaccgcgaactggaagcgaacggcaaagtgggcgcaacgttctcccgcgatctgctgggtatcaccaaagcgtctctggccaccgagtccttcatctccgcggcatcgttccaggagaccactcgcgtgctgaccgaagcagccgttgcgggcaaacgcgacgaactgcgcggtctgaaagagaacgtcatcgtgggtcgtctgatcccggccggtaccggttatgcgtatcaccaggatcgtatgcgccgtcgcgctgctggcgagctgccggcggcaccgcaggtgagcgtggaagaagcgtctgccaacctggcagagctgctgaacgcaggtctgggcggttctgacaacgattaatcgttgatgcactgctaaaaagccggtcaggtttcctgaccggctttttttattgtctatttttcgccgctttcccggcccttaattacatttacgacatattaaatcttcattttcttagcaattaattcatgcaaaatatctattagaagcctttttctaaaacctttctttatgtatgggtaaaacttctactcatatcaaaaaataatcaattcaaagggtatatattcaaaatacctgatgaatcatgggattacttctgttgctgtatcttcggcgcgacggcgctggagagggatagccgcatctcatgcttctcccggtctggcgcagaaataatcccgagaggcaggtagggatcatttttagatctgagtggacaggctctgggggctgcatggaattcgcgatacaactcattattatattaatttgtctgttttatggtgcccgaaaaggggggattgcgctggggttgctgggcggcatcggtttggtgatcctcgtctttgtttttcatctccagccgggcaaaccgccggttgatgtgatgctggtgatcattgcagtggtagccgcctcggcgaccctgcaggcgtccggcgggttagacgtgatgctgcagattgccgagaagctgctgcggcgtaacccgaaatatgtttctatcgtggcgcctttcgtcacctgcacgctgaccatcctctgcggtaccggccacgtggtgtataccatcctgccgattatctacgatgtggcgattaagaataacattcgtccggagcgtccgatggccgccagctccattggcgctcagatggggatcatcgccagcccggtctcggtggcggtggtatcgctggtggcgatgctgggaaattttacctttaacgggaaacacctggagtttctcgatctgctggcgataaccattccgtccacgctgctgggtattttagccatcggtatcttcagctggttccgcggcaaagacctggatcaggacgaagccttccaggcgtttattgcgctcccggagaaccgccattacgtctatggcgatacggcgacgctgctggacaaaaagctgccgaccagcaactggatagcaatgtggatttttctggcctctatcgccgtggtggcgctgcttggcgctttttctgaactgcgcccggcctttgacggtaaaccactgtcgatggtgctggttatccagatgtttatgctgctctccggagcgctgatcatcatcattacaaaaactaacccggcatcgatttccaaaaatgaggtctttcgttcgggaatgatcgctatcgtcgcggtgtacggcatcgcgtggatggcggagaccatgtttggcgcgcacatgaccgagattaaaggcgtgcttggtgaaatggtaaaagagtatccgtgggcttatgccatcgtgctgctactggtttcgaaatttgtgaactcccaggcggcagcgctggcggcgattgtgccagtagccctggccatcggcgtcgacccggcctatatcgtggcttctgcgccggcctgctatggctactatattctgccgacctacccaagcgatctggcggcgatccagtttgatcgctcagggaccacccatatcggccgctttgtgattaaccacagctttatcctgcccgggctcatcggcgtcggcgtctcctgcgtgtttggctgggtattcgcggcgatgtacggctttctgtaagaaggacgggcgccgacagcgacgcccgttaaatccgtgagattattgcgcgaggggcagacgacgatagagttcaatcatgtcggtcgccagatcctgaatgaccatagcgttcatcagatggtcctgggaatgcacggtgatcaagttgaccggcaatttaccgctgccttcatccatgccgataagctgggtctgaattttatgcgcatgtttgacgaactcatgggattcagccatggcctgctccgcggcgacaaaatcgcctttgcgcgccagctgtagcgccgtcagcgccgcgctacgtgcggaacccgcgttaaccagcagctccatgatgatcgtttctaaatcttccatcgattactccagcatcttaagggctttatccagaacggcatcacctttcatcatgccgtagtccatcatatcgatcacggcgaccttcttgccgaacgggtcggccagcgcctgcagcttcgcctgctcatatttcacctgcgggccgagcaaaataatgtcggcggcggccagattatctttaaactcagcgaccggtacggccttgatagagacctcaacacccttcttctgcgcggcatcttgcatacgctgaaccagcatgctggtagacataccggcggcacagcacaaaacgatattcttcatagtcagtggcccttgtgttccgtgatgtcttatctttatcgcggccctggcgatgcgacaaccgctttaccgtgattgtgtgtaaggcatcacacaataattgaaaccggtttcattttttccggaaaaaataaaaaagcccaccgaagtgggcggtggcggcgctgaagtcttacgcgcgcaggatacggtttttaccctgctgtttggctttgtacagcgcttcatcgacgctcaccaccagcttatccagtggctccatattccattccccaagtccggcgctgaaggtgaccgtcaggccatcttcgcgccaggtgcgtcgttcgacgtttatccgccatgtttccaacagcgtgcgggcgttatcgatatgttcggcaggaaagaccaccgcgaactcttcaccgccgtagcgatagagggatatctccagcggctggaggacctgtagcccttcgcgagcgacgttacgcaggacgatatcgccattgagatggccccaggtgtcgttgatcgatttaaagttatcgatatcgaccagcgcgagggcgaacggctggtgatcgttcatcagggcggcaatatcgctgtcgaaggcgcggcggtttttgcagccggtgagagcgtcgatggtcgcctggcggacgtaggacagttcgcgctgtttattagtttcaatcgctttactcagcatcgcctcaaggcgcggggcgcgtttgacgtcaccggttttaatcgcattgatgatattcatcagcacggtacgggaagcatgacgcagataaagaccgaacaggataataatgatcgctgcgagagtgaaaccgccgatcactaaattggtctcatgacgtgtcagattgaccagggtggcgttatcgacacggaaaatcacaaaccagtcgggattggtaaaggagtaatagtaataccaggtgtcgctcccgggatcgtaaagctgcccctctccgctggtcattttatccatcagctcgtccctgacgaagggtttaaacagcgcgcccgggtcggagtgcaggaccactttgccatcccgttgcaccacaaaaaattccccctgtacgggcgccaccatctggcgcagcgcgaaccccatggaggtgagatcgagatgaaaggccaggctgcccttgagtttcccttccggggtaatgatgggtttgaaaatggtaatcgtcggatggtgggtgaaataatccatatacggactggtgtagtggctgaaggtgctggcttccgcctgtttgataaaccagggccgcgttctgggatcgaaagcccggctgtcttcgttttccagcacctccggggcgcgcagatagtggccctcggtatccgccagcgagatggatgagacgcttggcatcatgttctgtaactgcatcagcgtggttaaccctttctccggctccacattgactgcgcgattcagttcgtcattgcgggcaaagaaggcggctgcgcgcccgaggataaaatcattttcccgcagcagggtttccgtatagttgatcgccaggttatgggtaaaattgcggttaatatcgtgataatcttcgagaaaatctttctgttgcgccagagtcacaaaaatagcgatcagcataaagctgagcaaaataccggcaaaccccacgacgatcggcgtcgtaaaagagagctttctgttgtgtagagccatgaatcgttaatcgtcccggatgtataaaccatgggtccgaacgcaggttgcgtctgggacgcctgccgatcgaatcagttcactattgctcaattataactctgaggccttcatgtatcgtgatttatattcggcgataatgtgcaggcctctgctcagcgcggagaggcagggcgaaaatgaggaagaaaaggttcgccctggtcagcgtccgctgctgaccagggcagaatagaaaaacggcgtcgggcgggccagcctccgtttttcatctctcgtgcaggcgcgcaaaattatcaggcgtttacactgtacatcatgaggtttgcgaagcgcgtcccagccagctatcccagtctttccataccggctgcaggccgcgggcggccagcgcgctggcgacctcttcagggcggcgatcgtcgtgcggggcaaattgctcgagctccggatgatcgtcggcgtagccgccgggctgggttttagagaaggcgctgacgttattgatcgccagcgggatcacccggtcgcggaaccagggggattcgcgggtggatagcgacagctcaacctctggcgccagcaggcggaaggcgcagatagtttgcactagctggcgctcatccatcagcgaagccggttcaataccgccggcgcagggacgcaggcgcgggaaggagaccgaatagcggctgcgccagtagcgctgctgcagccacagcaggtgctcagcgactataaagcagtccactcgccagctgtcggaaaggccgatgagcgcgccaaggccgatcttatcgatccccgccgcgcctaagcgatccggtgtatccagccgccagaagaaatcctgcttttttcctttcagatggtgttgggcgtacatgctttcatgataggtctcctgatagaccatcaccccgtcgagccccagggttttcagctcggcatactcttcagtcgccagcggctgcacctccatatgcagcgaggcaaactggctgcggatagccggtaggtgctgacggaaataatccattcccaccttaccctgatgttcgccggtcaccagcagcagatgctcaaagcccaggttgcggatcgcggcgcactcgcgggcaatctcggcggcatccagcgtcttgcgcttaatgcggttgctcatcgagaagccgcagtaggtacagtcgttagcgcacaggttggagagatacagcggcacgtagaagctgacggtattgccgaagcgctgccgggtgaggcgctgcgcgcgctgggccagcggttcaaggtaattggccgcgacaggcgagagcagggccatcatatcgtcgcgggtgagctgtttagccgccagcgcccgttcgacgtcggcggcggttttgctgttgatgcgcaggcggatatcgtcccactccagctgccgccagcgatcgctaaaggttttcatgccagcgcctccaggaatccggtgagcgggctggtggcctgcgcctgcgtactgcgtgcccccggtccggcctgacgcgccagtaatccggcatcgatcgccatacggaaggcgcgggccatggccacggggtcgtcggcgacggcaatggcggtattgaccagcaccgcgtccgcgcccatctccagcgcctgcgccgcatggctcgggacgccgatcccggcgtcgaccaccaccgggaccgtcgcctgctcgataataatctccagcatggctttggtttccagcccctgattggagccgatcggcgcacccagcggcatcaccgccgcgcagcccacctcttccagtcgtttacacagcaccggatcggcgccgcagtagggcagcaccacgaacccttcgcggaccagcagctccgccgctttcagggtttcaatcgggtcgggcagcagccagcgggcgtccgggtggatctccagcttcagccagtgggtacccagggcttcccgcgccagacgggcggcaaacaccgcctcttccgccgtcttggcgcccgaggtattcggcagcaggctgactcccgccgccagcagcggggcgaggatggcgtcattgcgctggcgtaaatcgacgcgcttcatcgccagggttaccagctggctgcccgaggcgcgaatcgcctcgaccatcaccttcggggcggcgaatttgccggtaccggtgaaaagatgggattcaaacgttttgtctgcaatacgtaacatgtcagcctccagcgataacctgaaaaagcaggacccgatcgccttcctgcaagagatgatcttcccaccggtcgcgcggcaggatgtgttgattgagcgccagcgcaacgccaggctgctgctgttcgagctgggtcagcagggcgctgacgctgagattgtcggcgcacgccagcggctcgtcgttaaaccagatctgcatgccgccctccgcacaccgggcagctccgggaacgctgtagcgcaagggcgcgccagttgctggtgcgggcgtcgaacagccgcagggtgttgcgcggcgtcgccatgccgctgagcagcttaattgtctccagcgcctgcagggtgcccatcatgccgaccaccgggccgacgatccccgcggtgcggcagttgcgctgcggttcatcgctttccggccacaggcagcgatagcagccctgcgtccagggcggggtgagcaccatcagctgaccgccgaagcccacggcgctggcggtcactaacggggtatcgagggccacacaggcggcattgatcgcctggcgggtgaccatattatcggtacagtccagcaccacgtccgctttcgccacttcggcgcgtagcgcctcgccgcttaagcgctgctggagcgctaccagtttgatctgcgggtttagctggctgagccgggtctgtgccgctgcggcttttggccgatcgatatccgcgctggtgaacaagatctgccgttgcaggttgctgagatgcaccgcgtcgtcatcggccagggtcagcgtcccgacgccagccccggccagatagagcgccgccggggagcccagcccgccaaggccgataatcagcactcgactggctaacagcttctgctgcccttcgatggcaatatcctccagcagcagctggcggctatagcgcataaagtcgtgatcattcatcgcccgctcccgccagcgccagcagttggtcggtcgctgcccgccagtccgccgcctgggtgatggcgctgaccaccgcgatgctgccgacgccggtcgccagtacccccggcgccttttccaggctaattccgccgatcgccacggtggggtaatccgccaggcgttgaatatgtctggcaagctgctcgaggccctgcggcgcggaaggcatctgtttggtttgcgtcgggaagacgtgacctagcgcgatgtaagaggggcgcgccgcaagggcgacatcaatttccatatcatcgtgagtagagacgccaagacgcagcccggcctggcggatagcgctcagatcggtggtttccagatcttcttgtccgagatgcacgccataggcctggtgcttaatcgccagttgccagtaatcgttaatgaacagtcgggcgtgatagcggcgaccaagggcgatggcggcgatcacgtcatcctcaacttcgctgtcgcgccggtctttgatgcgtaactgaagggtacgtaccccagcttcgagcaggcgctcaatccacgccacgctgtccaccaccgggtagagtccgagacgaaacgggacgggtggaaaatcaggttgatacatcaggcttcctcctgtttcaggtagatttcgccgccgcgggcgcggaagttattcgacatatcggccatgccggcttcgatactttgcttcgcggcgtagtcgcggacctcctgagtgattttcatcgaacagaatttcggcccgcacatggagcagaagtgggcgactttgccggactcctgcggcagggtttcatcgtgataggcccgcgcggtgaacgggtcgagcgcgaggttgaactggtcttcccagcggaattcaaaacgcgcttttgacatcgcgttgtcgcggatctgcgccccggggtggcctttcgcgaggtcggcggcgtgggcggcgattttgtaggtaatcagcccctgtttgacatcctctttgttgggcaggccgagatgctctttcggcgtgacatagcacagcatggcgcagccgaaccagccgatcattgccgcgccgataccggaggtgaaatggtcgtagcccggcgcgatatcagtggtgagcggccccagggtgtagaatggcgcttcgtggcagtgctccagctgttcggtcatattgcggcggatcatctgcatcggtacgtggccagggccttcaatcatcacctgcacgtcatattcccaggcgattttcgtcagttcgccgagggtgcgcagctcggaaaactgcgcctcatcgttggcatcctgaatggagccggggcgcaggccatcgcccagcgacagcgacacgtcataggcggcgcagatttcgcagatttcgcggaaatgctggtagaggaagttttcctgatgatgcgacaggcaccacttagccatgattgagccgccgcgcgagacgataccggtcaggcgcttcgccgtcatcgggacgtagcgcaacagtacgccggcgtgaatcgtgaagtagtcgacgccttgctcggcctgttccagcagggtatcgcggaagacttgccaggtgagattctcggcgatgccgttgaccttctccagcgcctggtaaatcggcacggtaccaatcggcaccgggctgttgcgcaggatccactcgcgggtttcgtggatatagcggccggtggagaggtccatcaccgtgtcggcgccccagcgggttgaccagaccagtttctcgacctcttcttcgatggaagaggtcaccgccgagttgccgatattggcattcactttcaccaggaagttgcggccgataatcatcggttcagactccgggtggttgatgttggcggggatgatggcgcgtccggcggccacttcatcgcgaacaaactcgggggtgatgttttccggaaggtgggcgccgaagccttcacctgcgtgctgctggcgcagaacctcgctgcggatacgttcgcgacccatgttttcgcgaatggcgatgaactccatctccggggtgactatcccctggcgggcgtagtgcagctgggtaacgcatttgccagcgacggcgcgtttgggcgtcagcaggccgctgaagcgcagctcatcgagaccgtcgtcggccagccgcgctttggtataggccgagctgcgttcgctgagcggcgcgcagtcgttacgcgcgtcgatccacggctggcgcagctttgccagcccctggcggacatcaatgctaatatccgggtcgccatacggcccggaggtgtcatacaccgggatcggttcgttggtttcgtaccggggtttatctttatcgccgccgacgagagttgggctgagctgaatttcacgcatcgggacgcggatatccgcttgtgagccgtgaacatagatgcggcgtgaattaggaaaagcggtacccgccagcgtatcaatgaatcgctgcgcgtgctcgcgttgttcccgacgggttagtttggtagtagacatagcgcattccagttaaaaaaggacatggcttgtcagacgacggatggagtaacagatgcgatcggccctgacggactgacgcgaacagcagtttactcttgttcccttcgcaggtattagcctgatcaggttccgcggatcccgaattaacggtctcagccttttccacgttagcctgcgcatggaaaataggcactccgacaagatgaaatccctccgcagagggataatgtacgtaaattacgcgttaacggttcacaactcaagcggtcggcgcaatattatcgcgcacgtcattgctcaggttatgggcgacagccagggcgatcagtttatcttccagcgcgaaacgcgcctccagcgactcgccgatatccgacagcgcctgctgaaattcaagatagttatcgtgatcgatggcgttttcgaggcaggtatcgtagtagtccatcatctgctgggtattggcttccagctgcgggtaaagccgggtggcggctaaaagaggggtatcgccttccatttcgccaataatgcgttcataaatactaaaatgaccggatgagaggtaatccaccagactttggcaaaagtcatccagcgccttttcgtttagccgcataaacgactctttgcccggtttcaggccaaccaggttgtagtaagccacgagcagatgcttacgcacttgtagccagcgatcgaccagttcattactaccgccaacgcgctccgtcagattttccagctggtttagcatgattgactccgctagttttgatttaaatctgctcaccaaaatgtaaatataatgttaacaacatgccagtgaagcaaaggtagtgcaatagatatggatcgtattattgaaaaattagatcgcggctggtgggttgtcagtcacgaacaaaaattatggttgcctggtggagaattaccacatggcgaagcggttaatttcgatcttgtcggccagcatgcgctgcatattggcgagtggcagggcgagtccgtgtggatggtgcgccaggatcgtcgccatgacatgggatcgttgcgccaggtgctggatcaggatccgggactcttccagctggctgggcgggggatccagctcgccgaattttatcgctcgcataaattttgcggttactgcggccacccgatgcatgccagcaaaagcgaatgggcgatgctgtgcagccactgccgtgaacgttactacccgcaaattgccccctgcattatcgtggcaatccgtcgcgacgatgcgatcctgctggcgcaacatacgcgccatcgcaacggcgtgcacaccgtgctggccggctttgtcgaggtcggcgaaacccttgagcaggcggtggctcgcgaggtgatggaggagagcggtattcgggtaaaaaatctgcgttacgtgacctctcagccatggccgttcccgcagtcgctgatgaccgcctttatggcggattacgcagatggcgagatcgtggtcgacaaaaaagagttactgaccgcggactggtatcgctatgacgacctgccgcttctgccgccgccggggacagtggcgcggcggcttatcgaagataccgtcgcgatgtgtcgggcagagttcgagtgacatgttacactgggcgtatcaacgctaaaggaatgtaaaaatgaccgaactgaagaacgatcgttacctgcgcgcgctgctgcgtcagccggttgatgtcaccccggtgtggatgatgcgccaggcgggccgctatttaccggagtacaaagccacccgtgcgcaagcgggcgactttatgtcgctgtgtaaaaatgccgagctggcctgcgaagtgactctccagccgctgcgccgttacccgctggacgcggcgatcctcttttcggacatcctgaccatcccggacgccatggggctggggctgtactttgaagctggcgaaggtccgcgcttcacctcgccggtaaaaagtaaagccgacgtcgacaagctgccgatcccggatccggagcaggagctgggctatgtaatgaacgccgtgcgcaccattcgccgcgaactgaaaggcgaagtgccgctgatcggtttttccggtagtccatggacgctggctacgtacatggtggagggcggcagcagcaaggctttcaccgtgattaaaaagatgatgtacgccgagccgcaggcgctgcatgcgctgctggataagctggcgaagagcgttaccctgtatctcaacgcgcagatcaaagccggcgcgcagtcggtgatgatttttgacacctggggcggggtgctgaccggccgcgactatcagcagttctccctctactacatgcataagatcgtcgatggcctgctgcgggaaaacgaaggccgccgcgtgccggtgactttgttcaccaaaggcggtggtcagtggctggaagcgatggcggagaccggctgcgatgcgttgggtctcgactggaccaccgatattgccgatgctcgccgtcgcgtgggtaacaaagtagcgctacagggcaatatggatccgtcgatgctctatgcgtccgccccgcgtattgaagaagaagtggcgactattcttgccggctttggccagggggaaggccacgtctttaaccttggacacggtattcatcaggacgttgaccccgagcatgcgggcgtctttgttgaggctgtgcaccgtctgtccgcaccctatcaccagtaggagataagccctatggatttagccgcactacgtacccaacagcaacagttagccgcgtcggtagagcgtgcggatcgactggatcgcgacccgccggcgttgatcggcggcgcggacgtcgggtttgagcaggaaggggagatcacccgggctgcgatggtgctgctgacctggcctgagcttgagctggtggagtatcaggtggcgcgggtcgccacctctatgccctatattcccggctttctctcgtttcgcgaaacgcctgcgctgctggcggcgtgggagcagctttcgcaaaaaccggacctgctcttcgttgacggacacggcatttctcatccccggagattgggcgtcgccagccattttggcctgatgattgatgtgccgactatcggagtggcgaaaaaacgcctgtgcggcaaaatcggcgacctgggtgatgagcctggcgcgctggccccgctgatggataaaaatgagcaactggcctgggtctggcgcagcaaagtgcgctgcaacccgctgtttattagcaccggccaccgggtaggcatggacagcgctttaatgtgggttgagcgctgcatgcgaggctaccgtctgcccgagccgacgcgctgggccgatgcggtggcgtcccgtcgtccgtcgtttgtgcgttggcaagcaaatcacagctgattcaggtacactgcgcctaatttctgacttcgagaattcatcatgttacaaaacccgattcacctgcgcctggagaagctggaaagctggcagcatgtcacttttatggcctgcctgtgcgaacgtatgtatcccaactacgcgatgttctgcaagcaaaccgagtttggcgacggcctgctttatcgtcgtatcatggacctgatctgggaaacgctgacggttaaagatgcgaaggtgaatttcgacagccagctggagaagctggaagaggcgatcccggcggcagatgatttcgacatgtacggtgtctatccggccatagacgcttgcgtggcgttgagtgaactgattcattctcgtctgagcggcgaaacgctcgagcacgcgatcgaggtgagcaagacctccatcaccaccgtggcgatgctggaaatgacccaggaaggtcgcgaaatgaccgacgaagagttgaaagcgaatccggcggtagagcaggaatgggatattcagtgggaaattttccgcctgctggccgactgtgaagagcgtgatcttgagctgataaaaggcctgcgcgcggacctgcgcgaggctggcgagagcaatattggtataaattttcagcagtgagaccagaaaacgtgatttaccgcctgaattgtagcgtctgaaggcttccattccgccccccgtctggtctacatttggagggcgaaaaaaagtggctatcggtgcgtgtatgcaggagggtgcttttttggcatttccgtcgcactcgatgcttagcaagcgataaacacattgtaaggataacttatgaacaagactcaactgattgatgtaattgcggacaaagctgacctgtccaaagcacaggctaaagctgccctggaatctaccctggctgcaattactgagtctctgaaagaaggtgatgctgttcaactggttggtttcggtaccttcaaagtgaaccaccgcgctgagcgtactggccgcaacccgcagaccggtaaagagatcaaaatcgctgcagctaacgtgccggcatttgtttctggcaaagcactgaaagacgcagttaagtaagaccgcgtggcagtgaacagttttatcgaaggggctattaagccccttttgtctgtctggcgccggcctctggcgctggcgggcatcctgttgctgactgcctgcagccacgacacgtcgctaccgccgtttaccgccagcggatatgcggacaatcagggagcgatgcgcatctggcgtaaagattctggcgatgaagtccatcttctcgccgccttcagcccgtggcgtcacggggacacctcgaccagcgaatatcgctggcagggcgatcaactggcgcttatcgaactcaatgtctatggcaaaccgccggaacatattcgcgcccgtttcgacgcgcagggcgatctgagctttatgcaacgggaagtggacgggcagaagcagcagctctccagcgaccaggtcgcgctatatcgttatcgcgccgagcagatccgccagaccagcgacgccctccgccaggggcgggtcgtcctgcggcaggggcgctggaacgctgccgcgcataccgtgctgacctgcgaagggcagacggttacgcccgacctcgatagccgggccctggcgcacattgaacgccgccagagccacgcttccgccgctgtgagcattgcctggctggaggcgccggaaggctctcaactgctgctggtcgccaatgaaaacttctgcacctggcagccgacggaaaaaagcttctaacctttaccagtggttcatgcccatatgaccgccggcgctaccgcgacagccgccatatcccattcctgcgccgcggggaacgcctgcctcagccagggcgatatcaaacttcacccgctgctgatccagcttctggcgtaagccttccatctcctgagcgacagcttcaatcttcccgctgtccggcttttgcgccgtgagcagcgcattgtactcatagcgtttggactgcagctgctggcgcagggcgctggtttgcgcatagtaatcgttatgcagcttttgcacggtagcctgctgctcctgggtcagctgactgtagccctggttgcccatcccgttattgttgccccagtggtggttggcccaggccgcgttgctggcgaaggtcagcgcggcaaaggtaacgagggcgagaggtaaggtacggttccgtttcatggcattttctcctgtgtggtttccttcggtattgcatcttccatgccagtctgaaaaagcccgtctgtgtcggcctgccgaagcctttgccgaggagagcgagtaaaaatgacccgttccgccagggtcaggcgagtcatttttactcgcttaagcgcaggcgatatgtttgagagcaggattggccgcgcggaaacatggcatgatttctgctgaaggagcctgcagatattgaaaaagagatgacaaggactcgccgatgaagatcaaatctctctcccgggacgccgccgctggcgcgctgagctggctgctgaccggcacggttgtgctgctggtcatgctgttctccgcgatgatcgtccgcgactacggtcgcgagacgaccgctgcccgacaaaccattgaagagaaagggagcgtgctgatccgcgcgctggagtccggcacgcgcgtcgggatggggatgcgtatgcatcatgcgcagctgcaggccctgctggaagagatggcctggcaaccgggcgtcctgtggttcgcggtgaccgatgaaaacggtaaaattatcgcccatagcgatccgcagcaggtgggtaaaacgctgtatagcccggcgcagatgcgtgcgttagcggttggcgaacaggcccgctggcgccggcttagcgaaccgcggccggcgctggagatctatcgccattttcgcccgcttaatccggcccgcggccaccatatgggaatgatgaaccgcggcaatagcgccctggctcaggccatcgtcccgcaggtgatttttatcgcctttgatagccgcgagctggatgccgcgcaggcccgcgggcagcgaaatatggccatcatgctgggtgccgccgcgctggtgatagcggcgacgatcctcgctcagttctggttccgccgctatcgtcgctcgcggaaacagctgctggaggcgatggcccgcaaggaaaagctggtggcgcttggccatctggcggcgggggtcgcgcacgagatccgcaacccgctctcgtcgattaaagggctggcgaaatattttgccgagcgcacgccgcctggcggcgagtcgcatcagttagcccaggtgatggccaaagaggctgatcgcctgaaccgggtggtcagcgagctgctggagctggtccgtcccgcccatctaaactaccaaacagtcgatatcaacgcgcttatccgccactcattgcagttggtaagccaggatgcgcagagccgcgggatcgcgctgcaatttactccgcgacctgagttaaccacgatcagcgccgaccccgatcgcctgaatcaggtgctgttgaacctgtacctgaatgcaatgcaggcgattggtcgtgacggcgtcattcgcgtaacagcaagcgaagccgatcgtcagcgggtgaaaatcgtcgtcacggatagcggtaaggggatgagcgatgaagagctacaggctatcttcacgccgtatttcaccaccaaggcggacggcaccgggctggggctggccgtagtgcagaatattatcgaacaacatggcgggacgatccgcgccgaaagtcagccgggagctggagcgatatttacgctttggttaccggtggatgctcaacggagggaagatgagcagcgataaagtacagattctggtcgttgatgatgacgtcagccactgcacgatcctgcaggcgctgctgcgcggctggggctatcaggtggggttggctcacaacggcctgcaggcgctggagcagatccatcagcaggtcttcgacctggtgctgtgcgatatccgtatggcggagatggacggtatcgcaacgttaaaagagattaaggcctataacccggcgataccggtgctgatcatgacggcgttttccagcgtcggtacggcggtagaagctattaagtccggggcgctggattatctggttaaaccgctggattttgacaccctgcagcagacgctggttcaggcattggcgcacacccggcagagcgagagcgaccccagcgttgcgacggattcacggtggggcatgattggcgacagcccggcgatgcaggcgcttcttaacgatattacgctggtggccccttcggacgcgacggtgctgatttatggggagtcgggaaccggtaaggagctggtggcgcgcgccatccacgcctgcagcgagcgtcgtgacaagccgttggtcacgctcaactgcgcggcgctgaatgagtcactgctggagtcggaactcttcggccatgaaaaaggggcgtttaccggggcggatcggcgacgggaaggacgctttgtcgaagcggatggcggcacgctgtttcttgatgagataggcgatatctcgccagtgatgcaggtccgcttgctgcgggcgattcaggagcgggaggtgcagcgggtcggcagcaaccagacgcttgccgttgatgtgcggcttatcgccgccacccatcgcaaccttgcggaagaggtgagcgccgggcgctttcgccaggatctctattaccgactcaacgtcgtgaccatcgagataccgccgctgcgccggcgacgggaagatattccgcagctggcgcagcattttctcaaacgctataccgaacgcaatcgtaagacggtaaaggggttcacgccacaggcgatggacctgctgatccactacccctggccgggcaatattcgcgagctggaaaacgcggtggagcgggcggtggtgctactgaccggaaactatatctctgagcgagaactgcccctggcgatcgccggtacgccgctgccatcagtcgggagcgaggaggggggaattcagccgttagtggaagtggagaaagaggtgattctggcggcgctggaaaaaacgggcggcaacaaaaccgaagccgcccgtcagttaggcattacgcgcaaaacgctgctggcgaaacttagccgttagccttttcacgttcgatggcgcgccagccgatatcgctacggctaaaactaccgtcccagcgaatgtcggtcagcagctgataggcgcgctgctgcgcctgcgctacggagtcacccagcgcggtgacgcacagcacgcgcccgccgttggtgaccacgcgctggtcgtcagacagtttggtgccggcgtggaagaccttaccgtctgcgacttcctgctgcggcaggccgtagatctcatcgcccgtattgtagctgcccggatagccgccggcggcaaccaccacgcccagcgacgcgcggtcatcccactcggaggttttctcgtccagcttgcccgcgcaggcggcgaggcacagctcgaccaggtcggacttcatgcgcagcatgatcggttgggtttccgggtcgccaaagcggcagttgaactcaatcaccttcgggttgccctgcttgtcgatcatcagaccggcgtagaggaaaccggtataggtgttgccttcagcggccatgcctttcacggttggccagataatccgctccatggtgcgctggtggacttcgtcagtaaccaccggcgccggggagtacgcccccatcccgccggtgttcgggccggtatcgccgttgccgacgcgcttgtgatcctggctggtggccatcggcaggacgtgctcgccgtcgaccatcacaataaagctagcctcttcgccatcgaggaactcttcaatcacgatgcggtggcctgcgtcgccaaaggcgttgccggccaacatatctttgaccgccgcttcggcttcctcgagggtcatcgccacgataacgcctttacccgccgccagaccgtcggctttgatgacgatcggcgcgcctttctcgcgcagataagccagcgcaggctccacttcggtgaagttctggtattccgccgtcggaatatgatgacgggcgagaaaatctttggtgaaggcttttgagccttccagctgcgcggcgccttcggttggcccgaagatgttcagcccggcggcacggaacgcgtcgaccacgccaatgaccaacggcgcttccgggccaacgatggtcagatcgatgttctcatcctgcgcgaagcgaagcagcgccggaatatcggtgacgccgatggcgacgttttgcagcgacggctccagggcggtaccggcgttgcccggcgcgacgtagacggtatcaaccagcggcgactgagccgctttccaggccagcgcgtgctcgcgcccgccgttaccgattactaatactttcatctgctgctccaggaattaatggcggaagtggcgcatgtcggtgaagatcatggcgatgccgtgttcgtcagcggcggcaatcacttcgtcgtcacggatagagccgcccggctgaataacgcaggtgatgcctaccgcggctgcggcatcgatgccgtcgcggaacgggaagaaagcgtcagaggccatggcggaacctttcacttccagaccttcatcaccggctttaattccggcgattttcgccgagtagacgcggctcatctgaccggcgcctatgccgatggtcatattatctttggcatacacaatggcgttggatttgacgaatttcgccactttccagcagaacagcgcatcgcgcagttcctgctcggttggctgacgtttgctgaccacgcgcagttcacctgcggtgaccatgccgagatcgcggtcctgaaccagcagaccaccgttaacgcgtttgaaatcgaggccggcaacgcgagtatcccactggccgcaggtcagtacgcggacgttctgcttcgcggcggtgattttcagcgcttcttcgctggcggacggcgcgatgatcacttcgacgaactggcgagagatgatcgcctgcgcggtttcagcatccagctcgcggttaaaggcgatgatgccgccgaacgcggaggttgggtcggttttgtaagcgcgatcgtaggcgtcaagaatcgagttgctgacggcaacgccgcacgggttggcgtgcttaacgataacgcaggccggctcgttgaactcttttacacactccagcgccgcatcggtatcggcaatgttgttataggagagcgctttgccctgcagctgagtggcggtcgccacggaggcctcttttacattctcttctatatagaaagccgcctgctggtggctgttttcgccgtagcgcatatcctgcttcttaatgaagttcagattcagggtacgcgggaagcggccagcggcttctttgctttcgccgtgataggccggaaccatgctgccgaagtagttggcgatcatgctgtcgtaagcggcggtgtgttcgaaggctttaatggcgaggtcgaagcgggtgaccagcgtgagagaaccttcgttggcgtccatctcattaataatggcgtcgtagtcgctgctcttaaccacgatggcgacatctttatggttcttcgccgcagagcgcaccatggtcgggccgccgatatcgatgttttccaccgcgtcttccagcgagcacccttcacgagcgacggtctgggcgaacgggtaaaggttcacgacaaccatatcgataggcgcgataccgtgttgctgcatgataccgtcatcctgaccgcgacgaccgaggatgccgccgtgtactttcggatgcagggtcttcacgcgtccatccatcatttccgggaaaccggtgtagtcagagacttcggtaaccggcaggcctttatctgccagcaggcgagcggtgccgccggtggacagcagctcgacaccacgagcggaaagcgcctgcgcgaattcgacgataccggccttgtcagaaacactgagcagagcgcggcggactggacgacgttgttgcatggtattaaatccccaggatttgaacattacagagagcgttaggtgagtttttgcctaaaaactcacctaacgcacccaaccgggcatccgtgtcatagcgcggcattgtaacgaaaacgtttgcgcaacgctcgcgaatttttatgtttctctccaggccggtgattctccttctatatagctggcgatgcacggggctagcggtcatgtttttacgctctcctgtggataattctgtgtgtaacgaggtataaagcggggttttgctggggaatgcagcagtcagtcatttttctgccatttttctattgcggacgctcgagaactccctataatgcgcctccatcgacacggcggatgtgaatcacttcacacaaacagccggttcggttgcagagaaaaatcctgaaaaacgggttgactctgaaagaggaaagcgtaatatacgccacctcgcgacagagcgctaaagcgcgtcgcaactgctctttaacaatttatcagacaatctgtgtgggcactcaaagtgacatggattcttaacgtcctcggacgaaaaatgaataccaagtctcaagagtgaacacgtaattcattacgaagtttaattctttgagcatcaaacttaaattgaagagtttgatcatggctcagattgaacgctggcggcaggcctaacacatgcaagtcgagcggtagcacagagagcttgctctcgggtgacgagcggcggacgggtgagtaatgtctgggaaactgcctgatggagggggataactactggaaacggtagctaataccgcataacgtcgcaagaccaaagtgggggaccttcgggcctcatgccatcagatgtgcccagatgggattagctagtaggtggggtaacggctcacctaggcgacgatccctagctggtctgagaggatgaccagccacactggaactgagacacggtccagactcctacgggaggcagcagtggggaatattgcacaatgggcgcaagcctgatgcagccatgccgcgtgtgtgaagaaggccttcgggttgtaaagcactttcagcggggaggaaggcgttaaggttaataaccttggcgattgacgttacccgcagaagaagcaccggctaactccgtgccagcagccgcggtaatacggagggtgcaagcgttaatcggaattactgggcgtaaagcgcacgcaggcggtctgtcaagtcggatgtgaaatccccgggctcaacctgggaactgcattcgaaactggcaggctagagtcttgtagaggggggtagaattccaggtgtagcggtgaaatgcgtagagatctggaggaataccggtggcgaaggcggccccctggacaaagactgacgctcaggtgcgaaagcgtggggagcaaacaggattagataccctggtagtccacgccgtaaacgatgtcgatttggaggttgtgcccttgaggcgtggcttccggagctaacgcgttaaatcgaccgcctggggagtacggccgcaaggttaaaactcaaatgaattgacgggggcccgcacaagcggtggagcatgtggtttaattcgatgcaacgcgaagaaccttacctggtcttgacatccacagaactttccagagatggattggtgccttcgggaactgtgagacaggtgctgcatggctgtcgtcagctcgtgttgtgaaatgttgggttaagtcccgcaacgagcgcaacccttatcctttgttgccagcggttaggccgggaactcaaaggagactgccagtgataaactggaggaaggtggggatgacgtcaagtcatcatggcccttacgaccagggctacacacgtgctacaatggcatatacaaagagaagcgacctcgcgagagcaagcggacctcataaagtatgtcgtagtccggattggagtctgcaactcgactccatgaagtcggaatcgctagtaatcgtagatcagaatgctacggtgaatacgttcccgggccttgtacacaccgcccgtcacaccatgggagtgggttgcaaaagaagtaggtagcttaaccttcgggagggcgcttaccactttgtgattcatgactggggtgaagtcgtaacaaggtaaccgtaggggaacctgcggttggatcacctccttaccttaaagaacctgcctttgtagtgctcacacagattgtctgatgaacgtaaagaagcaaggcgtcttgcgattgagacttcagtgtccccttcgtctagaggcccaggacaccgccctttcacggcggtaacaggggttcgaatcccctaggggacgccacttgctggttcgtgagtgaaagacgcgtgccgatgtatctcaaaactcatcttcgggtgatgtttgagatatttgctctttaaaaatctggatcaagctgaaaattgaaacgacacacagttaatgtgtgttcgagtctctcaaattttcgcaatcagaagtgaaacatcttcgggttgtgaggttaagcgactaagcgtacacggtggatgccctggcagtcagaggcgatgaaggacgtgctaatctgcgaaaagcgtcggtaaggtgatatgaaccgttatagccggcgatgtccgaatggggaaacccagtgcaattcgttgcactatcgttaactgaatacataggttaacgaggcgaaccgggggaactgaaacatctaagtaccccgaggaaaagaaatcaaccgagattcccccagtagcggcgagcgaacggggagcagcccagagtctgaatcagcttgtgtgttagtggaacggtctggaaagtccgacggtacagggtgatagtcccgtacaccaaaatgcacaggttgtgaactcgaagagtagggcgggacacgtggtatcctgtctgaatatggggggaccatcctccaaggctaaatactcctgactgaccgatagtgaaccagtaccgtgagggaaaggcgaaaagaaccccggcgaggggagtgaaaaagaacctgaaaccgtgtacgtacaagcagtgggagcaccttcgggtgtgactgcgtaccttttgtataatgggtcagcgacttatattctgtagcaaggttaaccgtataggggagccgcagggaaaccgagtcttaactgggcgttaagttgcagggtatagacccgaaacccggtgatctagccatgggcaggttgaaggttgggtaacactaactggaggaccgaaccgactaatgttgaaaaattagcggatgacttgtggctgggggtgaaaggccaatcaaaccgggagatagctggttctccccgaaagctatttaggtagcgcctcgtgaactcatcttcgggggtagagcactgtttcggctagggggtcatcccgacttaccaacccgatgcaaactacgaataccgaagaatgttatcacgggagacacacggcgggtgctaacgtccgtcgtgaagagggaaacaacccagaccgccagctaaggtcccaaagtcatggttaagtgggaaacgatgtgggaaggcacagacagccaggatgttggcttagaagcagccatcatttaaagaaagcgtaatagctcactggtcgagtcggcctgcgcggaagatgtaacggggctaaaccatgcaccgaagctgcggcagcgacactatgtgttgttgggtaggggagcgttctgtaagcctgcgaaggtgacctgtgagggttgctggaggtatcagaagtgcgaatgctgacataagtaacgataaagcgggtgaaaagcccgctcgccggaagaccaagggttcctgtccaacgttaatcggggcagggtgagtcgacccctaaggcgaggccgaaaggcgtagtcgatgggaaacaggttaatattcctgtacttggtgttactgcgaaggggggacggagaaggctatgttagccgggcgacggttgtcccggtttaagcatgtaggctgattgtccaggcaaatccggataatcaaggctgaggtgtgatgacgaggcactacggtgctgaagtaacaaatgccctgcttccaggaaaagcctctaagcatcaggtaacattaaatcgtaccccaaaccgacacaggtggtcaggtagagaataccaaggcgcttgagagaactcgggtgaaggaactaggcaaaatggtgccgtaacttcgggagaaggcacgctggtgtgtaggtgaagcccctgcgggtggagctgagaccagtcgaagataccagctggctgcaactgtttattaaaaacacagcactgtgcaaacacgaaagtggacgtatacggtgtgacgcctgcccggtgccggaaggttaattgatggggttatccgtaaggagaagctcttgatcgaagccccggtaaacggcggccgtaactataacggtcctaaggtagcgaaattccttgtcgggtaagttccgacctgcacgaatggcgtaatgatggccaggctgtctccacccgagactcagtgaaattgaactcgctgtgaagatgcagtgtacccgcggcaagacggaaagaccccgtgaacctttactatagcttgacactgaacattgagccttgatgtgtaggataggtgggaggctttgaagcgtggacgccagtctgcgtggagccaaccttgaaataccaccctttaatgtttgatgttctaacgttggccccttaccggggttgcggacagtgtctggtgggtagtttgactggggcggtctcctcccaaagcgtaacggaggagcacgaaggttagctaatcctggtcggacatcaggaggttagtgcaatggcataagctagcttgactgcgagcgtgacggcgcgagcaggtgcgaaagcaggtcatagtgatccggtggttctgaatggaagggccatcgctcaacggataaaaggtactccggggataacaggctgataccgcccaagagttcatatcgacggcggtgtttggcacctcgatgtcggctcatcacatcctggggctgaagtaggtcccaagggtatggctgttcgccatttaaagtggtacgcgagctgggtttagaacgtcgtgagacagttcggtccctatctgccgtgggcgctggagaattgaggggggctgctcctagtacgagaggaccggagtggacgcatcactggtgttcgggttgtcatgccaatggcactgcccggtagctaaatgcggaagagataagtgctgaaagcatctaagcacgaaacttgccccgagatgagttctccctgagactttaagtctcctgaaggaacgttaaagacgatgacgttgataggccgggtgtgtaagcgcagcgatgcgttgagctaaccggtactaatgaaccgtgaggcttaaccttacaacgccgaagatgttttggcgatttgagagaattttcagcttagattcagagttgagtacgcaataatttgcgcagcagcaaggcgacaagcgacggaaaggaaggagcatactgaagtatgtgactgactttacgagcgcaggcaacgcagctgatgcgataaagaattgcgtactgagcacaaagaatttgcctggcggcactagcgcggtggtcccacctgaccccatgccgaactcagaagtgaaacgccgtagcgccgatggtagtgtggggtctccccatgtgagagtagggaactgccaggcatcaaacaaagcagaaagcccggtcgaaagaccgggctttttgtttttgcgtttaaaaagaaccccatcccgaaaggtgcgggtttttttgctgtgtggggtatatctcccccggtggcgctgcgcttaccggggctacggatcctcggccacctgctggccgaggggacatcaatgccgcaaagttaccgacgtcaatcgtagtctgcttcagcctgctgctcatacatcaaattcaataacggatacggttgccccagatcgtccgtttcagagcgccctgtcaccctaaaacccatcttctgataaaacccgaccgcttgttcattctgctcatttacattggtcgtcagcttcggcgttaacgacagcgcatgctcaatcagcaacttccccacgccacagccgcggacatccggatcgacgaacagcgcatccatatgatctccggtcagcagcataaaggcgatcggctggtcttccgtactaaccgccacccacagcggagcctccggtaaaaatgcgcgtaccatctcctccagctcctttcgatacgcttttgtcagaaaatcatgcgtggcgtcgaccgaccgacaccagatcgcagtcagtttatccccttcatcaggccgggaacggcggatgttaataaccatactttctccttttctacattcttatattctaactcaacaagcgccgtgaaattttctcaccgtgtacatgcagactcgacattcacccgattcctggttatcttcagctatctggatgtctaaacgtttatacgtatgctatgaggtaatacagttatgccaattcgggtgcaggacgagctgccagccgtcaatttcttgcgcaatgaaaacgtcttcgtaatgacgacaacacgtgcaacgactcaggaaatccgccccctgaaggtgttaatcctcaacctgatgccgaagaaaatcgagacggaaaaccagttcctgcgtctgctatcaaactctccgctgcaggtggatatccagttattacgtatcgatgcgcgcgagtcgcgtaatacccctgcggagcatctgaataacttttactgtaatttcgatgagatctgcgatcagaactttgacggcctgattgttaccggcgctcctttaggcctggttgagtttaacgatgttgcttactggccgcagatcaaacaggtgctggagtgggccaaggatcacgtcacttcgacgctgttcgtctgttgggcggttcaggccgcgctgaacattctgtacggcattcccaagcagacccgcgccgaaaagatttccggcgtctatgaacaccatattcttcatccgcacgccttactgacccgcggtttcgacgactctttcctggccccgcactcacgctatgctgattttccggccggacttattcgcgactataccgatctcgagatcctcgcggagacggaagagggcgatgcgtatttgttcgccagcaaagataagcgcatcgcctttgtcaccggccacccggagtacgatgccaataccctggcaagcgaatatttccgcgatgtggaagccggtttgaaccctgagatacctcataactatttcccacaaaacgacccgcagaacaaaccgcgcgccacctggcgcagccacggcaatctgctgttcgctaactggcttaactattacgtctaccagattacgccatacgatctgcgtcatatgaatccgacgctggaataatactctacgtgagacgatcctaaagcgtttcagcattttgcctctggcaccttcgggtgccttttttatttccgaaattcacttcatacgcgaggataactttaatttcattgttatcaatgtgttaatgataaattaaaattaaaatggaaattgtttttgattttgtaaattaattgagtagtcttaattgtgctgagcgaaaactgcacaacgatctttcgctcgcttccagcggatcaaccaagaggagcagcacaatgacgcagcaggcgacaatcaccgatgaactggcctttagtcagccctatggcgagcaggagaagcagatcttaacgcctgaggcggtagaatttctgacggaactggtgagccgctttacgccggcgcgcaataagctgctggccgctcgtttgcagcaacagcaggctattgacgacgggcagcttccggattttatttcggaaactgcttccattagaaatggcgactggactattcgcggtatcccggctgatttgcaggatcgccgcgtggaaatcaccggccccgtcgagcgcaaaatggtcattaacgcgctgaatgccaacgtcaaagtctttatggcggactttgaggattcgctggcgcctgactggcgcaaagtcattgatggtcaaatcaacctgcgcgatgccgtgaacgggaccatcagctacaccaacgaggccggcaaaatctatcagttgcagcccaatcccgctgtgctggtatgccgtgtgcgcggcctgcatctgccggaaaagcatgtgacctggcgtcatgaggccatccccggcagcctgttcgattttgcgctctatttctttcataactaccaggcgctgctggcgaaaggaagtggtccctacttctatctgccaaaaacacaggcctggcaggaggcggcatggtggaacgatgtcttcagttttacggaagatcgctttgacctgccgcggggcaccatcaaggccacgctgctgattgagacgctgccagcggtgttccagatggatgagatcctgcatgcgctgcgcgaccatattgttggcctgaactgcggccgctgggattacatcttcagctatatcaagacgctgaaaaaccatccggatcgcgtactgccggaccggcaggtggtgacgatggataaacccttcctcagcgcctactcacgcttgttgattaagacctgccacaaacgcggcgcgtttgcgatgggcggtatggcggcgtttatcccgagcaaagataccgaacgtaaccgccaggtgctgagtaaagtcaccgccgataaagagctggaggccaacaacggtcacgatgggacctggatcgcccacccgggcctggcggataccgccatggcggtgtttgaccgcgtgctgggcgataagccgaatcagctctcggtcacccggagcgaggatgcgccaattaccgctgaacaactgctggctccctgcgagggcgaacgcacggaagccggaatgcgcgccaacattcgcgtggcggtgcagtacatcgaagcgtggatctccggcaacggctgcgtaccgatttatggcctgatggaagacgccgcaacggccgagatctcgcgcacctctatctggcagtggatccatcatcagaaaaccctgaacgacggtaccccggtcactaaggcgctgttccgccagtggctggcggaagagctgatggtgattcaggaggagctgggagagcaccgcttcagccacggccgctttgacgatgcggcgcgactgatggagcagatcaccacctccgacgagctaattgattttctgacattgccgggctaccgcctgctggcctaatcgccagatggtgtggttcgccatttagtccttcacctatgagcctggggagccaggaaattatatggagcatctgcacatgaaaacccgtacccaacaaatcgaagaattaaacaaagaatggacgaacccgcgctgggaaggcattacccgtccctacagcgcggaagaagtggtgaagttacgcggctcggtgaatccggaatgcacgctggcgcagcttggcgcggcgaaactgtggcgtctgctgcacggggaggcgaaaaaagggtacgtcaacagtctcggcgcgctgaccggcggccaggccttgcagcaggcgaaggcgggtatcgaagccatttatctctccggctggcaggtggcggcggatgctaacctggcgtccagcatgtatccggatcaatcgctgtatccggccaactcggtaccggcggtggtggatcggatcaacaacaccttccgccgcgccgatcagatccagtggtcagcgggaattgaaccgaacgatccgcgctttatcgactacttcctgccgatcgtggcggatgcggaggccggttttggcggcgtcctgaacgcctttgagctgatgaaatcgatgattgaagccggtgcagcggctgttcacttcgaagatcagctggcatcggtgaagaagtgcggccatatgggcggtaaagtgctggttccgactcaggaggcgattcagaagctggtggcggcgcgtctggcggccgacgtgatgggggtcccgacgctggtcatcgcccgtaccgatgccgacgccgcggatttaattacctcagactgcgatccgtacgatcgtgagtttattaccggggatcgcaccagcgaagggttcttccgcacacacgccgggatcgagcaggcgatcagccgcgggctggcctacgcgccgtatgcggatctggtgtggtgtgaaacgtcgaaaccggatctcgagcaggcgcgccgctttgccgaggctatccatgcgcgtttcccgggcaaactgctggcctataactgctcgccgtcgtttaactggaagaaaaatctcgatgataaaaccatcgccagcttccagcagcagttgtcggtcatgggatacaaataccagtttattaccctcgcggggatccacagcatgtggttcaacatgttcgacctcgcccatgcctacgctcagggtgaggggatgcgccactatgttgagaaagtgcagcagccggaattcgccgccgggccggaaggctacaccttcgtctcgcatcagcaggaggtgggcaccggctacttcgacaaggtcaccaccattatccagggcggtacctcgtcggtaacggcgctgaccggctcgaccgaagaagatcagttttaagccatgcccggtggcgcgacgctgaccgggcctgcaagaggacgcaggccggataagcgagcgcgccatccggcatgacgtggagccggatgggggagagcgatgacgcgtggtctggaattactgattgcccaaacgatattgcagggatttgacgcgcagtatgggcgttttcttgaagtcacttccggcgcgcagcagcgctttgaacaggctgactggcacgccgtgcagcaggcgatgaagcagcggatccatctctacgatcaccacgtgggcctggtagtagagcagctgcgctgcatcaccgaagggaaaagcactgacgtcgattttcttctgcgggtgaaacagcagtacacccaacttttaccggattaccctcgctttgaaattgctgagagctttttcaattcggtctattgccgcctgtttgaccaccgctcgctgacccccgagcggctctttattttcagctcgcagcccgagcgaccctttcgtaccctcccgcgaccgctggcgaaagatttctttccggaacgcggttggtcgcacctgctgggtaaagtactgtccgatctgccgctgcggctaccgtggcaaaacaaagcgcgggatatcggctatatcattgccagtctgcaggaggcgctgggggaggaactgctcgccacctgtcatctgcaggtcgccaatgagctgttctaccgcaataaagccgcctggctggtgggcaaactggtcatgccgatggcgacgctgccttttttgctgccgatccaccgcagcgaagagggtgagctgtttgttgacacctgcctcacaacccatgccgaagcgagtatcgtttttggcttcgcgcgttcctattttatggtttatgcgccgttgcccggcgccctggtggaatggctgcgcgagatcttgccgggtaaaacgacggccgagttgtacatggcgattggctgtcagaagcatgccaaaaccgaaagctatcgcgaatatctacactacattactcgctgcgatgagcagtttattgaagcgccgggtattcgcgggatggtgatgctggtgtttaccctgccgggctttgaccgggtgtttaaggtgatcaaggaccgcttcgcgccgcagaaagagatgaccgccgcccatgtgcgggcttgctatcagctggtaaaggagcatgaccgcgtcgggcggatggcggacacccaggagtttgaaaatttcgtgctggataaacggcaaatcgcgccggcgctgctggcgctgctgcaggcggaagcggggaacaaactcaccgatctcggcgaccgcatcgtcatcagccatctctatattgaacggcgaatggtgccgctcaacctgtggctggagcaggttaacggccaggcattgcgtgatgcggtagaagagtatggcaatgctatccgccagctggccgccgccaacatctttcccggcgatatgttatttaaaaacttcggcgtcacccgccatggccgggtggtgttctacgactatgatgaaatctgctatatgacggaagtgaattttcgcgagatcccgccgccgcgctatccggaggatgagctggccagcgagccgtggtacagcgtttcgcctggcgatgtgtttccggaggagttccgccactggctgtgcgccgacccgcgcattgggccactgtttgaagagatgcatgccgacctgctgcgcgccgactactggcgcgcactgcagatgcggattaaaaacggccatgtggaagatgtctacgcctaccggcgcaagcagcgttttagcgtgcgctatggcgccgacagtagaccggataaggcgtttacgccgccatccggcaaggtgcgccgatctgcctgatggcgctacgcttatcaggcctacttaaaatgcccctctggggcatttttttatttaaccccgccatacgccagcgtcacttccttcgccgccttgatcaccagcgcgcccagctcagtcacccgatcatcggtcatacgcgagatagggcctgagatggagattgccgcgaacggttcgcgatgttcatcgtaaatgcaggcggcgacgcagcgcaggccgagcgcgtgctcctcatcatcgaaagagtagccccgcttgcgggtctgggctaaatcttccttcagatgcagcggggagaccagcgtggcatgcgtataggcatgcagccctttacggtgcagcagactggtgacctgctcttcgctcagctgcgcgagaaacgccttcccggcgccggaagcgtgcatcggcagtttaccgccgattggcgccgacatccgcatcagctgggtgcactgcacctgatcgataatgatcgcctggtggtcgctctggtcgagcaccgccagattcaccgtttcaccggaatcttccatcagctggcgcaggatcgggtggacaatggccagcagattgcggctttgtagaaagctgctgccgaccacgaaagcatgcgcccctacggcccagtgacccagctcgccaacctggcggacgaagcccagctgttgcatggtggtcagcagacggtgagtcgtggagttgggcagacccgcctgctgcgccagttcggtcagcgcgacgctgctgtgggactcggcaatccattcgagtaatttcaggccgcgggtcagcgactgaacctgaccgccagcctgctgggcagtggcagccgcgggttttctgccgcgtttcgcgggaatgggggttgtggccatcgcgaactcctttttctgtatcgtggaaataattttcgttttatttggcaataatgcaatcacaaccggactcatcggaggagtgaagctgaacatgtctcatattgcccgttgttgtcttttccgctccggtggtttatgccagtatggtttgttggctatttggcctgagtcgagcgttgtcgggagcaagtgtgagcagcaaagttgagcaactgcatcagcagttaaaagaacgtattctggttctggatgggggcatgggcaccatgatccagggctatcgtctgagtgagcaggactttcgcggtgagcgctttgctgactggccgtgcgacctgaaaggcaacaacgacctgctggtgctcagcaaacccgaagtgatccgcgagatccacgacgcctatttcgaggccggcgcggatatcattgagaccaacacctttaactcgacgaccatcgcgatggcggattaccagatggaatccctgtcggccgagatcaactttgccgcggcgaagctggcccgcgccagcgccgacgcctggacggcccgcacgccggaaaaaccgcgctatgtcgcgggcgtgcttggcccgaccaaccgcaccgcctctatctcgcctgatgtgaacgatccggcgttccgtaatattacctttgaccagctggtggccgcctatcgcgaatccacccgggcgctggcggaaggcggcgtggatctgatcctgattgaaacggtgtttgacaccctgaacgctaaagcggccatctatgcggtgaaagaggagctggaggcgttaggcgttgacctgccgctgatgatctccgggaccattaccgatgcctctggccgcacgctttccggacagaccaccgaagccttttataactcgctgcgtcacgccgaagccttatcgtttggtctgaactgcgccctcgggccggacgagctgcggcagtacgtccaggagctgtcgcgcattgccgaatgctacgtcaccgcgcacccgaacgccggcctgcccaacgccttcggcgaatacgatctggacgccgacaccatggcgacgcaaattcgcgaatgggcggaagccggtttcctcaatatcgttggcggctgctgcggtaccaccccggagcatatcgccgccatgagccgggcggtagcgggcctgccgccgcgtcagttgccggaaattgcggtggcctgccgcctcgccggcctggagccgttgaatatcggcgacgatagcctgttcgttaacgtcggtgaacgaactaacgtcaccggctcggcgaaatttaagcggctgattaaagaagagaagtacagcgaagcgctggacgttgcgcgtcagcaggtggaaagcggcgcgcagattatcgatatcaacatggacgaggggatgctcgacgcggaagcggcgatggtgcgtttccttaacctgattgccggcgagccggacattgcccgcgtgccgatcatgattgactcctccaagtgggaagtcattgaaaagggcctgaaatgtattcagggcaaaggcatcgttaactcgatttcgatgaaagagggcgtcgaatcctttatccaccatgcgaaactggttcgccgctacggcgccgcggtggtggtgatggccttcgacgaggttggtcaggccgacacccgcgaacgtaaaattgagatttgccgtcgcgcctacaaaatcctcaccgaagaggtcggcttcccgccggaagatattatcttcgaccccaatatctttgccgtcgccaccggtatcgaagagcataacaactacgcacaggactttatcggcgcctgcgaagacatcaaacgcgagctgccgcatgcgctaatctccggcggggtctccaacgtctccttctccttccgcggtaatgacccggtacgtgaggcgatccacgccgtattcctctactacgcgatccgcaacggcatggacatggggatcgtcaacgccggtcagctggccatctatgatgacctcccgggcgagctgcgcgacgcggtcgaagacgtgatcctcaaccgccgcgatgacagtaccgaacggttacttgagctggcggaaaaatatcgcggcagcaaagcggacgacggcgcgaatgcccagcaggcggagtggcgcacctgggaagtgaaaaaacgcctcgaatattcgctggttaagggcattaccgaatttatcgaacaggacaccgaagaagcgcgtcagcaggccgcccgcccgattgaggtcattgaagggccgctgatggacggcatgaacgtggtcggcgatctgttcggcgaaggcaaaatgttcctgccgcaggtggtgaaatccgcccgtgtaatgaaacaggcggtggcctaccttgagccgtttattgaagccagtaaagagcagggctccagtaacggcaaaatggtgattgccacggtaaaaggcgacgttcatgacattggcaaaaacatcgtcggcgtggtgctgcagtgcaataactacgaaatcattgatcttggcgtgatggtcccggcggataaaattctcaaaacggccaaagaggtaaacgcggatctaattggtctttccgggctgattaccccatcgctggacgagatggttaatgtggcgaaagagatggagcgccagggctttaccatcccgctgctgataggcggcgcgaccacctcgaaagcgcatacggcggtgaaaatcgagcagaactacagcggccccaccgtttacgtacagaacgcctcgcgcaccgtcggcgtggtgtctgcgctgctctcggacacgcagcgcgacgagtttgtcgcccgcacgcgcaaagagtatgaaacggtgcgtatccagcatgggcgtaaaaaaccgcgtacgccgccggtgacccttgccgccgcgcgggaaaacgatctggcctttgactgggagagctacacgccgccggtggctcatcgtctgggagtacagacggtggaagccagtatcgagactctgcgcaactacatcgactggacgccgttcttcatgacctggtcgctggcgggtaaatatccgcgcattctggaagatgaagtggtaggggaagaggcgcagcgcctgttcaaagacgctaacgagctgctggataagcttagcgcagagaaaaccctgaacccgcgcggcgtggtgggtctgttcccggccaaccgcgtgggcgacgatattgaaatctatcgcgatgaaacccgcacccacgtgctgacggtgagccatcatctgcgccagcagacggagaaggttggcttcgccaactactgtctcgccgattttgtcgcgccgaagctgagcggcaaggcggactacatcggcgccttcgccgtgaccggcggcctggaagaggacgcgctggcggacgcctatgaagcgcagcatgatgactataacaagatcatgattaaagccatcgccgatcgcctggcggaggcctttgccgagtatctgcatgagaaagtgcgcaaggtttactggggatatgcggccaatgagaacctcagcaatgaggagcttattcgcgagaactaccaggggatccgaccggcgccgggatatccggcctgtccggagcacaccgaaaaggggaccatctggcagctactggacgtcgaagcccataccggcatgaagctcaccgagtctttcgccatgtggccaggcgcatcggtttccggctggtacttcagccatccggacagtaagtacttcgccgtggcgcagatccagcgcgatcaggtcgaagattacgcgctgcgtaaaggaatgacgccggcggaggtcgagcgctggttagcgcctaatctgggctatgatgcggactagtcgtcatctttccttacaacaaacaaggcgctctgtgagcgccttgtctctttattgaggttaaccccttatactgagataggttcctgaacttcggaaaacctataacgataaggagaagctgattccgtgttaactctgctacacctgttgtccgcggttgctctgctggtgtggggcacgcatatcgtgcgtaccggggtgatgcgcgtctatggcgctcgcctgcgtaccgttctcagtagcagcgtagagaaaaagccgctcgccttctgcgcgggtcttggcgtgactgcgctggtgcaaagcagtaacgccaccaccatgctggtgacctcatttgtcgcccaggatttagtgggtctgatgccagcgctggtgatggtgctgggggccgacgtcgggacggcgctgatggcgagggtgttgaccttcgacctgtcgtggctgtcgccgttgttgatatttatcggggtgattttcttcctcggccgcaagcagacccgcgccgggcagcttggacgggtggggattggtctggggctgatcctgttggccctcgagctgattgtccaggccgtacaccccataacccaggcgaacggcgtgcaggtgattttcgcctcgctgaccggcgatatcatgctggatgctttgattggcgccgtatttgcaatcattagctactccagcctggcggcggtgctgttaacggcgacgctgaccgcggcgggagcgatctctttcccggtggcgctgtgtctggtgattggcgccaacctgggatcggggctgctggcgatgcttaacaacagcgcggcgaacgcggcggcgcgccgggtggcgctgggcagcctgctgtttaagctggtggggagcctgattattctgccgttcgtccatccgctggccgcggcgatgcacaagctgccgttggccgagtccgagctggttatctacttccacgtcttttacaacctgctgcgctgcatcgcgatggtgccctttgccggaccgatggcgaagctgtgccagcgtctgatccgcgatgagcccgagctggataaccatctcaaacccaagcatctcgacccgtcggcgctggacaccccggcgctggcgctggccaatgccgcgcgtgagacgctgcgcattggtgacgcgatggagcagatgctggagagcctgcacaaggtgatgcatggcgaaccgcgtcaggagaaagagctgcgccgtatggcggatgatatcaacgtactttacaccgctattaagctctatctggcgcgaatgccaaaggatgagctggcggaagaggaatcccggcgctgggcggaaattattgagatgtcgttaaacctcgaacaggcgtccgatatcgtcgagcgaatgggcagcgagatcgccgataaatcgctggcggcgcggcgcgccttctcggtagaagggttaaaggagcttgatgcgctgtacgatctgctgctcagcaacctgcagctggcgatgtcggtcttcttctccagcgatgtgcccagcgcccgccgcctgcggcgcagcaaacaccggttccgcattcttaaccgccgctactcgcatgcgcacgttgaccgtctgcatcagcagaacgtgcagagcatcgaaaccagtacgttgcacctggcgctgctgggggatatgaagcgtctgaacagcctgttctgctcggtggcttacagcgtgatggagcagccggatgaagacgacgaacgggatgactactgagacggattatttttccgtttatgtcgcttcttttctggcgaggtagccctcccgggacgtggctgacgccttcccgggagggacatcctagcttctggcaaacgccgaggcctctgccaccagcgcgctatccggccgtacgccggtataaagggtaaactgctcgacggcttgcagggcaataacttccgcaccgctgatggtttgcttaccccgttgttgcgccaggcggatcagcggagtttccgccggcaacgcgaccacgtcaaacacgacgctggcctgggccaccatggcctcgctgaacgccagcgtgttgctttccgctccccccgccatgcccagcggtgtgacattgaccagaatctcggctgcgatcccttcgggcaggggctgccactgaaagccatactgttttgccagcgccaggccgcgctggcgattgcgggccgcaatgatcacgtcgcggaaaccggcatcacggaaggcggcaatgacggctttccccatgccgccgctaccctgaatcatcactctggcgttggtatcgagccgatggctggcgatcaggcttttgaccgcgatgtaatcggtgtttagcccggttaacttcccgtcgtcgttgacgatggtgttgacggagtcgatgacttttgctgacggatcgatcgcgtcaagaaacggtatgcagctctctttaaacggcatggagaccgcacagccgcggatacccaatgcgcgaaccccttttaccgccgcctcaatatccttagtcgtaaaggctttgtagaggtagttcaatcccagcttgtcatacagatagttatgaaagcgggtgccgaagttgccggggcgacccgccagggagatgcacagcagcgtatcgcggttaatcatgcgtaatatcctccgcgtgggccagcagatacgcttcagcatcctgggaccagatcccatggtgacgcgccacaatcgctgccagttcgggatcggcgatctcgcccagcggcgtgagcgggaaggcttttccggtatacaccagcttttttcccccgccgacggcaggcagatcgagggtggtttcgcccgcggcgttcaggccgagaatatgggtgaccactttcgccgtctggacctttttcgcctgcatcagcgccaccgcggcgcgcatatcgtcagtattaccgccggaggtgccgacgtagtgggtaaaggcgtagtgcacgtcgtagaagttgatcggggcgctgaattgcttatcctgggggccagcaaagaaattcaggcagccgtccggagccagcaacgaggaggccagggtgatcagctgttcgtttggcacaaacacgaagatatcgtcgaagccatggccgccgctgagcgccagcagcgtatcgcgactggcctcatggccgtcgaggtagtggatcagcgtctgcggctcagaggggtaatgacggcgggcgtagctgagcttcggcttattggtatcggtcactaccagtagtgaaggattgatggggccgtgcagcgcatagtcgatagccagcagccccatcggccccgtcccgcccaggatcagagtgtgtccctgaggacggatccccatcacgtggttgtaactcccctcctgcagatgataattggcgttgaaagcgccaatgacgcaggagagcggctccaccagcgatccttcaaaccaggtatccccctcccaggtgagcaggcaatcctgcgccatcacctcattggggatcaccacatgggtggcttcgccaccgatccatgggaatgagtagccggggcagtcgggtcggtcgggcaactgcaggttggcctggatcacgtagcgctgccctggctgaaacttatgctgccactttttaccgacggcaaggatttcgccgcagaattcatgaccgataataatgggcctggtggccacatcatctggcacctttttatgatcggcaccctgattggcctctttccatgaggaaagacacaggctgtccgtgaccacccgggcgaggatctcatcgtcctgcatcgccgggagggtaaaggtttccaggcgcaggtctcgtttgccatacaggcgcagggccgttgttgtttgcataaaccacctcatccccttcatctttcggggctatgttgttgacgtcaccccggcatcgccggggcggaataatcaggacagaaagccgagggcgttgccgataatgcctaagccgaaaagggcgaaaatcagccagaccggattcactttcttgttcagcagacgcaccatcagtagcgtcaggcccagcgccagcaggccggggcagagctgatcgaggatgttctggacggtcatcgtgacggtggcgccgtctgcaccgggcgtttgggaaaccaccagcggcacattgatggtggtccatttggtcaccagcacccccatgacaaacaggccgagaatggaggcgccttcggtcagcttctgcagcaggttaccgcccatatcgctgacgatattgacccctttacggaagcccagttgcaggccgtaccacttcattgccagccgcactgcattgaaaataaagaaaaataacaaaggtcccagaatgttgccggagagggccagtgaggcgccaagggccgcggtaatcggccgcagcgtgccccagaccagcgggtcgccgacgccggccagcgggcccatcagacccactttgatgccgttgatagcgccatcgtcaatggccgcgccgttagcccgggcctcctccatggcggcggtgacgccgatcaccgggccacacaccgccggcgtggtattaaagaacaccagatgacgcttcagcgccgcgacctgatcggctttgagcggatacaggcgtttgatcgccgggatcatgtcgtagcaaaaccccaggccatgaatacgttcgaagttaaaggaggcctgctggaggttggagcggagaaacatgctcaccaggtcgccttgcgtgatttttttctgttccattttcggctccattagtcgtcaagctggtcaagggcgggggcagagggggcagtggaggcggcgggttcagccttacgccactgtggattgagctggatgtagatcagcgcgatgatgacgcccacgccgccgaaggccagcaggctgaagtcgagataacccccggcgagaaaaccgaggaaaaagaagggcatcaggtatttcacgcccatcattcgcagcaccatcgcgtagcccacgacgacaatgaaaccaccggcaatctgcaggccgcgggtgacgaattccgggatcgcgctgagcatactgctgaccatatccgcgctaacgaacagcgagaccaccagcgccgggattgccacgcgcagtgcctgcacccccagtgcggagacatgcagcaggtcgatggtgcgaaagcgcgcctcctcggccgctttgtccgcggcgtgctggaacaccacggtaatggtacgggcgaaaacggtcagcacctgcccggcggcggccaccggcagagcaatggcgataccggtggcaatgctctggtggcccacaatcaccagaatggcggagataatgctggccagcgccgaatctggcgactgcgctgcccccacgttcatccagccgagggcgatcagctccagcgtaccgccgagcataaccccggtttttaaatcgcccaggatgaggccaatcacggtacaggcgataaggggccgatgggtctgaaattcatccagcacgctgcccattccggcaatacaggaaaaaataaatatggctattatctgtagggtactaatttccataatttatgacctttaaggtgtgagtcatcctgcctgctacggcatatcacaacaggcgctattttttattcgcagaaagctgtttcgttaattttgtcgagaatattgactgacggatctgatgcgaccacgcgtaaatcgagttttacgcccagtttatcgagttcacggaatgcctgaatatcctgcggatccaaagaaacggctttggttagctgttttttaccgggtcgccaggccatgccaccaatatttaacgtggcgatctgcacgccctggcgcaccatcgttaaaacatcgtgtggattggtaaataaataaaagacggtctcgtcctgatattgcgggttatgatagaccgcaaccgctttttccagactgacaacgtttaccttcatgcctggcggagccgcctggcgcaacagggtccggcgaacctcatcgttaaatacatcgtcattgcagataattatccgctgggcgttggcgacttttgaccacacggtggtgacctggccatgaatcagtcggtcatcaatacgggcgagggtaatttgcatcagaactcctcctcaacggtttctggctgctgccagaccacacagcactgactggcgatggcctgcagatgctggcataagtcatcggcgctcagggtatgctggttatccaccagctcgagcgccagcggcagcgacaggccgctaatcacccggatctgcgggtgacgcattgccagcccggctgcggcattccatgggcttccgcactgcaaatctaccgcgattacccactcctcatcggtgtgggcgcttactaacttttccaggttaatggcgatattcgccgcgttttcgccggggacaaacgcgacggcgctgacgttaacctcgccgtagaccatgcgtaccgaatcgagcatggccccggccagctggccgtgagcgcagaagatagcgtgaaccatacttcctccttaaccgcgcgttttaccgccggcaatgttagtggtgactccggtgatgtagctggcgcgcgctgacaagagatagcaaacaaaatcagccacttccgagagctttcctgcccgcccgatgggaatggcgtttttggtatatccctcgcgaagttgctcgacggtgatattgcgcgtccaggccagcgcctcttcatattccggtgtccgcagaccggttttttcgaggatccccggcgcaacgccgaccacgcggatcccatatttacccaattctttggaccaggagcgggtaaagctgttgagcgcggccttggtcgcggcgtagcagctttgaccttcagagccttccaggccgctctccgaagagacattgacaatcacaccggcgcgctgtttgaccatttgacgcgccaccgcctgcgacatgaaaaacacccctttctggttgatattgaccattttttcaaaagcggcttcgtttaattcatagcggccggccggtgctttttcgtcgactaataaacgcgggaaattcacgccagcgttattgaccaaaccatcaatacgcgaccagcgctgaataatggcatcgatagtctgttgcacctctgtcgcgctggaaatatccgtcggccagaagtgataattatcgccattgtgatgacgatcgccgccatgaatatcaatcatctggacatgagcaccttgtgataataattcatcgacaatggccagcccaattcccgaggcgccgccggtcacgataatgacgttatcttttaaatttaaccaggtattcattattcactcccatttctttagataaagggatcccccgcagcgggtgctgcgtgaaatcatatcctgtgtgttatttcagtaataactcagccgtttctctgtttgtcaccagacaattaatatagcgtccgtgcaatgcgccaagaatgccagagtatttctcttcccccatggcgatgccgatggaatagcgagcctggcgcagcttcgccatttcgatcgacagggttttttcgctcatattggtatcgactaacccgccgttaatatcgtagaaacgcgaacagatatccccggcgacgtggcgggcgttgagatcgtcgctctcttcgctgccgtagaaggcgtgccagtttgcgccgtcgcgaatggccggtgaaccaatacccaccagcgccacatccaggctgtcccagtaggatgagatggttttaaagtgctgggactgcatgatgccgttgcggatcagcgggttatccagcagggctggaaaatcggcaaggtgggattccgctttcagtctggctgccgcgccgtaggttaaggtgttcacatggtagcggctctccagtttaccggaaggtccaccgatgatggggacgcagatcacctggcgtgactggctggcctgcggcaggttctccaccagcgaacgcacggcgcggccccatgaaaaaccgatgatatcgcctggctccagcaaccgatcgacaagcagggcgccatgctggcccatcgcactcagctgttcttcttccagcagcccatcgctgctggcaaccaccgcctctttcaggccaaatttttgcttgagctgttgctcgagccacaggttttcattgtagtcatagttgatggcgatggtaacaatgccctgctcgcggccgcgcttcagcaggcgactgatggtggtgcgatagatccccagctcgcgagcaatttgcgcctgagtcatatcctgctcgtaatagagctgggcgattttgacaatcaaccggatatcgtcactgttttccatggtcatctgcaggctcctgcacatttgtgcaaatcgcgggtttgtgctgttgatctgatataaccctattagagccaccgtttaaagcgattttcttttatttcatcaccctaatctggcgaataatcttgcacatttgcgttatcaatagcgggttgttggcacctttgtgcattgcacgctaaatcgctgattctgtgatatttcatcatgcaaagttgccaggcgttgagcgggacacttttgtgaaaaaaggcgtagtcgatcacaccttgcgccggagggcgcaaaggcacatcttttttctcgcccacaaggtagggtatatttcgcttttacaggagaatctatgctgcccgactcatcaacccgattaaataaatacatcagcgaaagcggcatctgctcgcgtcgcgaagcggaccgctttattgaacaaggcaacgtctttatcaatggcaagcgcgccactattggcgatcaggtgaagcctggcgatttagtcaaagtgaacggacggttgattgagccgcgcgaagcggatgatctggtactgattgcgctgaataagccggtcggcattgtgagcaccaccgaagatggcgagcgcgacaacattgtcgatttcgtcaaccacagcaagcgtatctttcctatcggccgtctggataaagactcccaggggctgatcttcctcaccaaccatggcgatctggtgaacaagatcctgcgcgccggcaacgaccatgaaaaagagtatctggtcacggtcgataagccggtgaccgatgagttcattcgcggcatgggcgcgggggtaccgattctcgggaccgtgaccaaaaaatgtaaggtaaagaaagaagcgccgttcgttttccgcatcactctggtgcaggggctgaatcgccagatccgtcgtatgtgcgagcactttggctatgaagtgacgaagcttgagcgtacgcggatcatgaacgtgagcctgacggggatccccttgggtgaatggcgtgatctaaccgatgacgagctgatcgacctgttcaagctgattgaaaactcctcttccgaagcgaagccgaaagccaggccgaaggccaaagcggcgactcccggcatcaagcgcccggtggtgaagatggaaaatagcaacgataagggccgcccggctggtaacgggaaacgtttcacccagccgggacgtaaaaagaaaggacgttaacgcctgccgcgggtcggcgtattcgccgaccaggaaaaggtcgcttccttatccgttttataagcctgctgttttctcacctggcgggctttcttcgcttccgcttcacgctgcgccatcagcttatcgatatattcctttttcacgctgttcgtttccgcattgctcagcgggcggccatgcgcaatacgcgcgcggtcaagcagcgttttcaattcgcgctgttcgcgctcggtcatctctttttgtgtaatacgggggagtgccatggtggtgccctcagtcagaccagagcacccagtgtacggcaatgaatattttactgatagcctgtatggcaactaaagcaggcacacgcccgggcctgcgcccggacgtatcaaactcagcgcttgtcggcttttttggcgatgggctttcctgaccagtacccggccagcagcgaaccggacaggttatgccagacggagaacagcgcgcccggcagcgccgccagcgggccgaagtaaattttacccagcgcggccgccaggccggagttctgcatccccacctcgatcgccagcgtacggcaggtggattcatcaaaaccaaacagacgtccgccccagtacccgccaagcagaccaatagtgttatgcaggatcaccgcgataatcaccaccaggccgacggaggcgatatgggcggcggaacccgccaccaccgcgctgatgatcgccagaatgcacaccatcgagaaggcgggcaggaacggctctaccgctttcaccaccttcggcagcagatgatggacaatcagtcccagcgcgataggaatgaccacaatctgcagaatgctgagcaacatgcccatgacgtcgacctgaatatgcgcgtcgacgtacagacgggtgagcagcggtgtcgccacgacgccgacgagggtggagaccgaggagatggtcaccgacagcgccacatcccctttggcaagaaagatcatcacgttggaggcggtcccgctggcgacgctgccgaccagcaccatcccggcggaaagctccggcggcatatgaaacagcagcgccagcagccaggcggcgagcggcatcaccagataatggagaaagatccccgcagcgaccggcgccgggcgcgacaggacgcgtttgaaatcctccagcttcagatgcacgcccataccgaacatgatcagcatcagcagggtggtgacccatgggccaattggggtgaaggtggtgggagtgtaataggccagaacggagagcagcagtgcccataacgggaacagccgcgtcagagttgcgagcatgttgtgttccttgcgatacgcgaaccgggccgcgccatcccgatgggcggcgagcaggtcagctggttgtgttgatgttgttataaaaaagccgggttcgagcccggctataggtattgtttatcgtgctaaggaattttattcaaacaaattatgatgcagcttctgcacaaccttctccgcatcgtcgcccggcaccaggaagcacaggttgtggctggaggcgccatagcagatcatgcggatgttaaacggctcgaggacgccaaagacctctttgccgacgccgcaggctttcgacagctcattgccaatcagggcgaccagcgccagattttcttccacttccacgcggcacagcgaagagagctcggtcagcagcgcctgggtcagcagggtatcgcccgcagaggtcgagccggtggtgtccatggtcagggccacgctcacttcggaggtggtgatcaaatcaactgagatgttatggcgcgccagaataccgaacacttcggcgaggaagccgcgggagtgcagcatattcaggctgtgcagcgtcagcagcgtttgccggcgacgcagcgccagcgcgcggaacagcggcgggttctcggtggttttacacaccagcgtaccgcccgctttaggctctttactggagccgacaaacaccgggatatcgctgcgcacggcaggcagcagggtcgccggatgcagcactttggcgccaaaggtggccatttccgctgcctcttcaaaggcgatgacgtcgatgcgtttcgccgccggcgcgacgcgcgggtcggtagtatagatccccgggacatcggtccagatatcgacgcgggtggcattcagcgcttcgccaagcagagcggcggtataatcgctgccgccgcggccgagggtggtggtgcggcctttcgcttcgctgccgataaagccctgggtcaccaccaggccttccgccaggcgcggcgccagctgctgctgggtcagttcggcgacggcggcgatgtccggttcggcgcggccaaagcgatcgttagtgcgcagcactttacgggcgtcaaaccactgcgcctgaataccgcgttcacgcagaatttccacaaacagcagggtggacatcagttcgccatggctgaccagttcgtcggtcagggcggttgaggaggcgagcgcggcggcttccgccagcgtcgtgatattttccagcaagcgctcaatctcttcgcggatcacgttgggataacgcaaacgctccagaatattgaactggatctgacgcagagcgtccagctgggaaaaacgttcggtgggttccagccctcccgctaaggccaccagaatgttggtcacgccggcagaggcggagagcacaacaatacgggtattggcatcaagcagcgccacatcgatgctgcggttcattgcgtcaaaatcagcaacgctggtgccgccaaatttggcgacgactagatctgtcataacaacctcgtgtcagggggcctgacttattaaaacgattcctgagcaccgatcctggcaggggctggacgccgccggatcgcaacaaaatgtcttaataagccaggccaaattattcagccatggcacaagggaagagcgataaacagggtggcgcagagtgataaacaactacgatgtcacccagaagtgctccaccttgtagacccgactcaccgctttgggcgctgaggtgttcgggtatgaaacgcccgactgcgaacgtttctggtgacaacccaggggattcagcccctgtggccggcgaggagcgtgaccagacgctctttcacctcggcgttgctccccctcacgtatcttccccggactggttcctccaatacggttacctgggcaacgcacctcttctggcaattactgacgtctttcacctggccgggggaacagggacattatatcccccgcgaataccctttcgctgtagcgtgaaatgcgcgagcaatagatacctaccaatacgtaagcactgcggatatataaaggcttaacgccagctatgtcaacgctgcggttatgcggatttttcatgcctctgcggctaacagaaaaaagccttatgatagctatactaatggggctttttactccgttttgacccgattcctgaccggcgtcagggtcaagtcacaaaaatcatcacaattttccgtcaccggcgctacaatcgaccgaagtcacaatctcaaatcagaagagtattgctaatgaaaaacatcaacccaacgcagacctctgcctggcaggcattacagaaacacttcgacgaaatgaaagatgtcactatcagcgagcttttcgccaaagatagcgaccgtttttctaaattttccgcgacgttcgacgatctgatgctggtggacttctccaaaaaccgcatcactgaagagacgctggctaaactgcaggatctggcgaaagagactgacctggcgggcgctatcaagtcgatgttctcaggtgagaagatcaaccgcaccgaagaccgcgcggtactgcacgtcgcgctgcgtaaccgcagcaatacgccgattgtggttgatggcaaagatgtgatgccggaagtgaacgctgtgctggagaagatgaaaaccttctccgaagcgattatctccggtagctggaaaggctacaccggcaaaccgatcaccgacgtggttaacatcggtatcggcggctccgacctcggtcctttcatggtgaccgaggcgctgcgtccgtataaaaaccacctcaacatgcactttgtctctaacgtcgatggcacccatatcgccgaagtgctgaagaacgtgaatccggaaacgactctgttcctggtggcgtccaagactttcactacccaggaaaccatgaccaacgcccacagcgcgcgcgactggttcctggcaaccgcgggcgacgacaagcacgtggcgaaacacttcgccgcgctttccaccaacgcgaaagcggttggcgagttcggcatcgacaccgccaacatgttcgaattctgggactgggttggcggccgttactccctgtggtcggcgattggtctgtccatcattctctccgtgggcttcgacaacttcgttgagctgctgtccggcgcgcatgcgatggataagcacttctccaccactccggcggagaaaaacctgccggtgctgctggcgctgatcggcatctggtacaacaacttcttcggtgcggaaaccgaagcgattctgccgtacgaccagtacatgcaccgctttgccgcttacttccagcagggcaacatggagtccaacggtaagtatgttgaccgtaacggccacgcggtagactaccagactggcccaatcatctggggtgagccgggcaccaacggtcagcacgcgttctaccagctgatccaccagggcaccaaaatggtaccgtgcgatttcatcgctccggctatcacccacaacccgctgtctgaccaccatcagaaactgctgtctaacttcttcgcccagaccgaggccctggcctttggtaaatcccgcgaagtggttgagcaggaatatcgcgatcagggtaaagacccggcgaccctggagcacgtggtgccgttcaaagtgttcgaaggtaaccgcccgactaactccatcctgctgcgtgagatcaccccgttcagcctcggggcgctgattgccctgtacgagcacaaaatcttcacccagggcgcgatcctcaacatcttcacctttgaccagtggggcgttgagctgggcaaacagctggctaaccgcatcctgccggagctgaaagacggcagcgaagttagcagccacgacagctctactaacggcctgattaaccgttataaagcctggcgcgcataacgcttgcgcagctaagacggaatgccgaccctttggtcggcattttttatttatagccgccgcagcagcctcgctggattccccgcccacacgcctttctcggtaatggacttcgttaccacgctgcccgcgcctatcaccaccccatcgcagatgctgacggccagaatcgtggcgccgctgccgatcgacacgtcatcgccaatctcgatccgcccccagctggcgcggtcggcgtttggtttaccctcgcgaaacaggtcgttggcaaacatcacgccgtgaccgataaagcagcgctggccgatggtgacgtactcgcagataaaggtatgggattgaattttactgttcgcgccgatgcgggtattcccctggatctcaacgaacggcccgacgaagacgttatcgccgagctggcaatcatagaggttggcgggctggtaaataacgacattttccccacaaacgacgttacgtacgccggtatcacgaagctcaggcatagttcctctcaaatcggtttggccagaatatgtaaggtgctttgctggctggcggagtggaaagtcgtgtctctgatgtgctgcatcccctggcgttcgtaaaaacggcgcgcggcgggattcgcggcgagtacttccagccacagccaactttcaccggccgtttttgctcgcgtctcgacggcgtgaaaaatatgctcgccgtagcggtggccagtcttccccggcatcaggtagagcttatgcagcagcgtaccaatcttgccgtcgtcagccattcgctgctgatagctatatttagcgaaaccaacaggagagggggcttcggcgatgagccagtgttgggtcgcatccgcaagactccgacgtagcgcatcttcggcatattcttgcttaagaaataacgccagttcatcggcatcgcgccagagatgagcaaagtggtgatgatagctggcatagcccatcgcgctaagctggggcgcgtcctcgggacatgcctgtcgaatagttaacatgctgcgttcctcgcgtcgttctgcggctatattgcctgtaaagtgaacaatgtggaacgacaaaaatcggtgggagaaggctggaggcgctccctccagcctgggggttagcgggcgaaagcgatcgcttcgatttcgacgccggcatctttcggtaaccttgctacctccacacaggagcgcgccggaaaggccgcctggtgttcgataaagaaggcctcgtaggcggcattgatggcggcaaaatccgccaggtctttgacaaacaccgtagttttaacgatctgcccgaccgtgagtccggcagcttcaacgatggctttcacgttctccagtgattgccgcgcctgttcggcaatgtcctcgggcatggtgccgtccagcggattaatcggcagctgaccggaggtgatggtcatcgcgccgagattgacgccctgcacgtacgggccgatagcggcaggcgcgtcagcggtggtaataatcatacggtttatccttcaaacggttacataaaataatttaacaacaccagcgagccgacgccgctcactaccacccacaccagacctaaacggaagctggcgagcgtgcagatgatggcggcgatcaccttcggattttttaagtcgaactccatgctggaattcacgctcaggatctgaatggtgatgatggccggcagaacggtgaccggcacgaagcgtagcgttttggtcacccgctcggacatctggatcttgccggccaggccgataaacgagaaacggatgagaaaagtcaccgcggccatgcccagcgtcagggcgataaaatagctattactcattttccatcgcctccactaacggcatatcggattcggtttttgccatctgcttgcgctcttccgccaggtcgacgcacaggccggcgaggacgccaagcactgaggcgacaacgatacccagcgaatagggtaggaccactaacagcacgccggaaacggcggctacaaccgcggcgacggtgcaggcctggcttttaatttgcggcaccacgatggcgataaaggcggcgaccatggcgaaatcgagaccgtatttctcaatgtggggaaacgaggcgccgaccagcgcgccaagaaaatcagccagcacccaaatcgcccagaaggtaatcatcgccgaaccataaaacagatatttttcctttttatttccttccatctctttgacggtggtggcatacacctcgtcggtgagcgcataggacataaagcattttttaaagaatgaagcttcgcgcacggtgccggaaatagaggcgctatacagcacgtggcgaagattgataattaatgtggtgaaaataatcacgccgagcgtggcgccggtttttaacatattcagtgccagcatttgcgccgagccggcaatgacgatcgccgaccacgccgtactctgccagacgctcatgcccgcgctaacgcttaatgcgccgacaataaatgaaaatggaaagtcgccgatgcataggggcataatagcgctggcgccgcggaagatgacttttttattcatctgctatacctgctaatttataaataatagtgtgggtagagtacgttaatcggggcctgctctttcaggcccgtgaaatggtattatttagcgaccataatgctgataatttctttatcggtgagagtcattggtttaatcaccagacggcataagttattaatggtttgctcaacatcagcgcagacaataccgtcattggcgccagcacagctattttgcatggccattagtaccgccttaaaggcgctggataccactgacgagactttcatcgcgcagctgttggaagcgccatcacaaatcatgccggtaatatcgctgatcatattaataatcgcggtattaatcgtgttgatgtcgcgggtaaacagccaggccataccggcggcggcgcccatagcggcggttgaggctgcgcatagcgcagataagcgcgtgtaacgagaatgaattgagatggcggtgagatgagagagagacaaagcgcgagccagggtctcttcatcgacgccgagatgctctgcaaccaccactaccggcatggttgctgtaatgccctgattgcctgagccgaagttagacatcgctaccaccggcgcgccgcccatgcgggcatctgaagcggcgacggtgttgatgatcaccttgcttaacagatcgttgctcatcaggccgtttttcactgcgtcagaaaaggtaccgttaatgttcaggccatatttttttgttttgccttctgccgccagcgcggagtttaagcgcgcggcgtcgagaataaagcgaatatcattaaagtcgacgcgattaataaagtcgtaagcctgttgtagcgagaaagtgggcagcgtttcgcgctgggtgcgcgtattctgtttttcgcttaatggctgcggctggccattaatataaagttcgaccacgttggtgtgggttcctttgaccacgacacgacagcaattatcgccagcagagagggttagatcgagatgaataaaatcaggagtctcttcgacggcaatatcaacggcgttattggcgatcagcttctgcgccatttcaacgtgttgcggagtgatatcttccagcgtttttaatcccttttgcgggtcgccgccaaatgcgccaattgcggctgccagcggtacaccgcaaacggtggtgccgggtatggtgacgcccatcgcgtttttataaagattggcggaaataaaaccgctaattttagtgcaaggctgatccagatattgtgcggcgtaggcggccgcgaaggaaatagcgacgggttcagtacaacctaaagccggggcgacctcttgtttgagccattttacgtacagggaagcgttatcggtgttcataatgatttaatgtccaaaattaaattttattcagctgcgataatgctaagacaaaagataagaaaaaacttaccctaataaccataaaaagactgtggtttggagaaaaattttatcttatgggaggttttaagatacacctgtttcaaaaagtaaactttttatatttcagttagttgggttgattcgttctaagcgtaacggatgattttgttaatctgctcacagcgttgctggaaggacaattttctcttgttcgtacttttcgaatcaatagcccggagatagcgtaagacgaaggaatcataggtagatctggatcacacttttgcgctatacagatcgacaacgttcatgcatttgaggtgtcactatgccgtcggtatatcgtccgctggttaatttcgttgcgaaggccatgcaggccgtgctgaatctggcactgctgtgcctgggaattattctggtggtgttcctgggaaaggagaccctgcatctggcgcacgtactgtttacgccggagccggtgagtaagtacaagctggtcgaagggctggtggtctattttctctactttgagtttatcgcgctgattgttaaatattttgaatccggttttcactttccactgcgctatttcgtctatatcggtattaccgcaattgtgcggcttattatcgtcgatcatgagtcgccgctggcggtgctcatttactccgcggcgatcctgatcctggtgattacgctctggctgtgtaactccaatcgcctgaaacgcgaataaaaaaaagcggcctccagggccgctgaccaacagtcacaaatagaatttatgtagggtccagttgaggatagcagtggcattgaccttactttttcagctgagggcgacggcgacaatacccggttggggtcgtgtattgcggctagaccgtcggccctcctctgaaatttggggccggtgttacaaaaaaattaacctttcactccacccgccgtcaggccattaaccagccagcgctgcgccagcaggaagacaaccgtgatcggaatggcggagagcaccgccgcggcggcaaagtcgccccacagatagttctgcgggttgagatactgttgcatacctaccgccagggtatagctgttcacatcgcgcagcagcagcgaggcgaccggcacttcggtgatggccgcgatgaacgacagaataaacacgactgccagaatcggcaccgacagcggcagcagcacgaggcggaaagcctgccatggggtcgcgccatccagcgccgccgcttcttccagcgagccatcgatggtttcgaagtagcctttaatcgtccagacgtgcagcgcgataccgcccatgtaggcaaagatgacgccgccgtgggtgttgaggccgacgaacgggatgtactggcccaggcggtcaaacaacgcgtacagggcaaccagcgacagcaccgccgggaacatctggaaaatcagcatccctttcagcagggtcgctttccccgggaagcgcatacgggcgaaagcgtaggcgcaggtggtggagagagcgacgataccgatcgcggtgatcccggcgaccttaatcgagttccacagccacagcaggaccgggaacggcggcggcgtgacgcggccatcggcgtgttcgacgctgaagcctaacgccagacgccagtgttcccaggagatggtatccgggatcaggctgccggtggcgaagttgccttcgcgcagcgagatagcgataaccatcagcagcggaaacataatcgcggcgataaaaatcagtagcaggagatgcgtggtaaataaacgtagcttctgcgatttgggttggaccatagccattgtcgttatctcccttaatcaaacttcatgcgcgtggctttcagattcacaatcgctaacgcgccaaccagcaggaagataagcgttgcgatagccgccgccaggccgaagtcctgaccgccgccgccttcaaaggcgatgcgataggtgtagctcaccagcaggtcggtataaccggccggggtggtggtgccgagacggtccggaccgccgttggtcaacaattgaatcaggacgaagttgttaaagttaaaggcgaagctggcgatcatcagcggcgttagcggcttaatcagcagcgggaaggtaattttaaagaagttctggaacgggccggcgccatccattgccgacgcttcgtacagatcgtccggaatcgccttcagcagccccatgcacaggatcatcatgtacgggtagcccagccaggtgttgacgatgatgatcatggtgcgcgcggtggtcgggtcgctaaaccaggccggcttaatgccgaacagcgtgctgagcatcatgttgatttcaccaaagctctggttgaacagccctttgaaaatcagaatcgaaataaacgacggtacggcgtacggcagaatcagcaggacgcgataaatcgctttgcctttcagcgcttcccactgcaccaagcaggcgaggatcatccccaccgcgacggtcagcaccacggtcagcaccgagaacaccaccgtccagacgaagatcgcgaagaacggtttctgaatgccttcatcgtggaagacgcgggtaaagttgtcccagccgatagtcacagtgtagcccgggctcagcttctcattgccccagctgccgtcggcgttaattgactggtagaagccgacgtcgttgttcgggcggtatttaacgtgggtctgattgttggtcagtaccccgtcttcgccgagggtatacagaggctgggtaccggagaactggcgcagggagctcatgatgactttgctgtcatccggcagcacagcggtcagctggttcagcgcggtgcgattctgggtaatcacgcgcaggttggcgcgctcgccttccggcagggcgtcggtttcttttaacgccagcttctgctcgccgccaaatttaaaggcgtcagaaaggtagtttttaccgctttcgccgtcggtcagcgccagcttccactcgtcacccgcagggatcagcgtgaaattataggctttgccggcctggaaggaacgatccatcagcacctgctgcgcacgctcaaaggtcagctggttggtgctgctgtagttggtaaacgcgatagcgatagtgcagatcagcggaaacaggacaaacaggcccatgccggcgaggccgggataaacatagcgccaggcataagccttgcgattagcgaaaatatacaggccaactgagcttaaaatcagcgtcatgatggcgaacaggtactccccctgggcgtacatcaaaacaacaaggtaacccaccagcaggcacagtaagccaatcacagaccatgtgagttgcgggctttgccaccagtgtctctttttaacggcatccatggggatcatcctctacagcggtgaaaacttatttgtcaggtggcgcttcgcttacctgacctacggtccgagccgtagtggtagggcgggtaggcgcacgcgccacccgccgttttcttacttagtgatacggctctgtgcatctttcagcgcagcatcgacagtctggcgaccgctggcggcgttgataaccgcggtacgaacggcataccagaaggcagacatctgcgggatgttaggcatgatttcgcctttctgggcgttcgccatggtggcagcgatgcgcggatctttttccagtttttcctggaaggatttcagcgccacggcacccagcggtttgtcgttgttaacggcttccagaccctgatcggtcatcaggtagttttcgaggaactctttggccagctctttgttcgggctggcggcgttgatccccgcgctcagcacgccaacgaacggtttcgatggtttgcctttaaaggttggcagcagggtcacgccgtagttaaccttgctcttatcgatgttagaccacgcccacggaccgttgatggtcatcgcggtttcgcctttgttgaaggccgcttccgcgatggagtaatcggtatcggcattcatgtgcttgttcttgatcaggtcaaccaggaaggtcaggcccgctttcgcgcctgcgctgtccacgccgacgtctttcacatcgtacttgccgttttcaaacttgaacgcgtatccgccgtcggcagcgatcagcggccaggtgaagtacggttcctgcaggttgaacatcagcgcgctcttacctttcgctttcagttctttatccagcgccgggatctcttcccaggtcttcggcgggttcggcaccaggtctttgttgtaaatcagggacagggcttcgaccgcgatcgggtaggcgatcagtttgccgttatagcgaaccgcatcccaggtgaacggatagagtttgtcctggaacgctttgtccggggtgatttccgccagcaggcccgactgcgcgtagccgccgaaacggtcatgcgcccagaagatgatgtccgggccgtcgccggtcgccgcaacctgcgggaatttctcttccagcttgtccgggtgttctacggaaactttaatgccggtgtctttttcaaactttttacccacttcagcgaggccgttgtagcctttgtcgccgttaatccagataaccagcttaccttcttcaatttttgcgagggcagaggcggaaaacatcatcgtggtcagtgccgacagcgcgaggatgcgagcgccagttttgattttcatatacccgtcctttttggtgttgtactcgtggatacacttcggtggcttaacgatgatgagtttccttttttaacaacccctttccatcctccccaggtctacgccccacccgctggttgtgtgatctccattgcaaaaacggccgtattgcgtcctggagcacagaaaaaagcgcccaattttgtcgcctccatcacgaaatcacgctccgcccgccatcccccgcggcgagagccaatctctcatcctcccatctcctcccccataaaaaagccggggggtggaggatttgcctgcgtaatgaatgccgcatagtcgacccatcttgaatgtgactgttagtgacaggttgtaacgaagggagaagggcatggcgagcgtacagctgcgaaatgtaacgaaagcctggggtgacgtggtggtatcgaaagatatcaatctcgatatccacgaaggggaattcgtcgtgtttgtcgggccatcgggctgcggcaaatctaccctgctgcgtatgattgccgggttagaaactattaccagcggggacctgtttatcggtgacacccgcatgaacgagatcccaccggcagaacgcggcgttgggatggtattccagtcttatgcactctatccccacctttccgttgcggaaaatatgtcgtttggcctgaagctggccggcgcgaaaaaagatctgattaaccagcgggtgactcaggttgcggaagtgctgcagctggcccatctgctggagcgtaaaccgaaagccctctccggcggtcagcgccagcgcgtggcgattggtcgtacgctggtggcagagccaagcgttttcctgctggatgagccgctttccaacctcgatgccgccctgcgcgtccagatgcgtatcgaaatctcccgtctgcataagcgactgggccgcaccatgatctatgtcacccacgatcaggtggaagcgatgaccctcgccgacaagatcgtggtcctcgacgccggccgtgtggcgcaggttgggaaaccgctggagctctatcactatccggctgaccgcttcgttgccggcttcattggttcaccgaagatgaacttcctgccggtcaaagtcaccgcgacggctatcgatcaggtgcaggttgaactgccgaaccgtcagcaaatctggttaccggtggacagcgccaacgtgcaggcgggcgccaatatgtccttaggtattcgaccggagcatttactgcccagcgatatcgccgatgtaacccttgaaggcgaggtccaggtcgtcgaacagctcggtcacgaaacgcaaattcatatccagatccccgccatccgtcagaacctggtttaccgccagaacgacgtggtgttggtagaagagggagccacattcgctatcggtttgccgccagaacgttgccatttattccgtgaggatggcaccgcttgtcgtcggctgcataaagagccgggcgtgtaaggcttcccattaaaaaagcgcgaacccggctggcgatataccggcgaagcgtgcaaagaaaagcaatgatctcaggagatagaatgatgattactctgcgcaaacttcctctggcggtcgccgtcgcagcaggcgtgatgtctgctcaggcgctggctgtcgatttccatggctacgcgcgttccggcattggctggaccggcagcggcggcgagcaacagtgcttcaaagcgaccggcgctcaaagtaaataccgtcttggtaacgaatgtgaaacctatgcggaactgaagctgggccaggagctgtggaaggaaggggataagagtttttatttcgatactaacgttgcctattccgtgaatcaggaagatgactgggaaagcacctctccggcgttccgtgaagccaacatccagggtaaaaacctgatcgactggctgccgggctccacgctgtgggcgggtaaacgcttctatcagcgtcatgacgttcacatgatcgacttctactactgggatatctccggcccgggtgcaggtctggaaaacgttgaccttggcttcggtaagctctctctggccgctacccgtaactcagaaagcggcggctcttatactttctccagcgatgacaccaaaaaatatgctgcgaaaactgccaacgacgtctttgatatccgtctggcgggtctggaaaccaacccgggcggcgtgctggagttaggggtcgattacggccgtgctaacccgcaggatgactatcgcctggaagacggcgcgtcgaaagacggctggatgtggaccggtgaacatactcagtctatctggggcggcttcaacaagtttgtggttcagtacgccactgacgcaatgacctcctggaacagcggccactctcaggggaccagcatcgataacaacggcagcatgatccgcgttctggatcacggcgcgatggacttcaacgatgactggggcctgatgtacgtggcaatgtaccaggacgtggatctggacagcaagaacggttctacctggtacaccgtgggtgtccgtccgatgtacaaatggacgccgatcatgagcacccagctggaaatcggttacgacaacgtgaaatcccagcgtaccagcgaaaacaacaaccagtacaaaattactctggctcaacagtggcaggcaggcaacagcgtctggtctcgtccggctatccgtatcttcgcaacctacgcgaagtgggatgaaaactggggctacagcaacacctccggtctgcagacgaaagacagcagcggaagcggcgctttcacctccagccgcggtgacgacagcgaagttaccttcggtgcccagatggaagtgtggtggtaataccgtccgcaggacgggtgtaacctgggaggggcgtcagcccctcctgattattcagggttagcgcgctattgcctggctaccgctaaaccgatgctatccaaggtgagaagaatgaaaatgaagaaaactctcgtcgctctgtgtttatccgcagggatgttggcatgcgtgccggggatgagccttgccgatgttaactttgtaccgcagaacaccagcgccgcgccggctattccagccagcgcgctgcagcagctgatctggacgcctgccgatcaatcaaagacgcagagcgttgatttaaccaccggcggtcaacgcctggatgtcccggggatcgtcggaccggtcgccgcctggagcgtgccggccaatatcggtgagctgaccctgacgctcgacagcgaactgaacaaacataaacagatttttgcgccgaacgtgctgattctcgaccagaacatgacgcccgcggcgttcttccccagcaattactttacctatcagcagccgggcgtgatgaccgctgaccgcctgggcggcgtgatgcgcctgaccccggcgctgggccagcaaaagctctatgtgctggtgtttaccactgaaaaagatctccagcagaccacgaccctgctggatccggcgaaagcctatgccaaaggcgccggcaatgcggccccggatatcccggatccgatcgctaaacataccaccgatggcgtgctgaagctgaaagtgaaaactaatagcacttccagcgtgctggtagggccgctgttcggctcctccggcccgggtccggtaaccgtcggcaacaccgcggcgccggtagccgcgccagccgccgccgcggcgccggccgccaaaagcgaaccgatgctcagcgataccgaaacctacttcaacaatggtattaagcaggcggtgaaacaaggtgacatcgacaaagccctgaaattgatgaacgaagctgagcgcctcggctcgaaatccgctcgttccacctttatcagcagtgtaaaaggcaaggggtaatcgtctccccacaatgctgatgtttaggcacagcctttaggtgcatcctccgggatgcacctttttttgcacgcgcggcagcctgttgcatggctgttgcgtgaatgatcgtatattgacgtttgcccgccaccaaccgcctattctgcgatacaatgctttcacgttatgtaccggagaatcaggcatgtcccatcctgcgcttacgcgactgcgtgcgctgcgctattttgccgttatgccatccctgccgccgccgctaagtgactggctgctgctggaggactcaatgacccagcgctttgaacaacaaggaaagcaggtcaccgtgaccctggttaacgaagggtatatcggccgtgacgcgctgactgacgaagcggcgctgctgcccgacgagccgcgctactggctgcgggagattatactcaatgccgatggcgagccctggctggccgggcgcacggtggcgccggagtcgacgctgtgtggtccggagctggcgctacagcagctcgggcaaactccgctgggccgatacctgtttacgtcgtcgacattaacccgcgattttattgaaattggtcgcgatgcagcgctgtgggggcgtcgttcccgcctgcggctgagcggcaaacccctgctgctgaccgagctttttttgcctgcgtcgccgttgtactaagaggaagaaaaaatggagtggagtctgtcgcagaataagctgttggcgtttcatcgcctgatgcgcactgacaaaccgatcggcgctttgctgctgctgtggccgacgctgtgggcgctatgggtggcctcgccgggcgtcccgccgctgtggatcctggcggtattcgtcgccggcgtctggctgatgcgcgccgccggctgcgtggtgaatgactatgccgaccgaaaatttgatggtcacgtaaagcgtaccgcccgccgtccgctgccgagcggcgatgttaccgagaaagaggcgcgaacgctgtttatcgtgctggtgctgctctctttcctgttggtgctcaccctcaacaccatgaccattctgctgtcggtggcggcgctggcgctggcgtgggtctatccgtttatgaagcgctacactcatctgccgcaggtggtgctgggtgcggcctttggctggtcgatcccgatggccttctcggccgtcagcgaatcgctgccgctgagctgctggctgatgttcctcgccaatattctgtgggcggtggcctacgatacccagtatgcgatggtggatcgcgatgacgacgttaagatcggcatcaagtcgacggcgatcctgtttggcgaaaacgatcgtctgattatcggtatcctgcaggtggccgtactggcgctgatgggcgcggtgggttggctgaatgggctgggctgggaatattactggtcgctgttcgtggcggcgggtctgtttggctggcagcagaagcttatcttcaatcgcgaccgcgataactgcttcaaagcgtttatgaacaataactacgtcgggctggtgctgttcctcggcctggcgatgagctacctgtaacctcctgtccgctgccccccggcattccggggggcagcaaacgccgcgttacgcgtcgtcctgcgtgacgctctcaatggtcagtcggacatccgacgtaatcaagtccgccagcatccgataaaccttcagggtctcttccggctcggcgtcgccggtgtcgctgatatagccttcatcgcgcagggtcaacaccagggtgctgaacaccgctttgtcgaagaactccggtgcattgatgccgtgtagcaccgacagacgctgggccacggtgcgactctctttttccagcgagctgcggttgatcgccgggttagcgctcagcagccagaaggtgatggcatagcgctgcagcgtctcgcgggcgccagcggccagcagctgcagggagcgagagtgcgacgggttgaggctcatgacatcgccatcgacgacgatcagctcctgacgcagcatctcggcaatcagcgcatccaccactccggccagctccgctttttcccagcgcaggaacagctcggccttgaggaacggatagagtgtttccacatgacgcagcacttcggcgcggctgagatgacgatgctgagtcaccagagcggctaacagcgacggcatcaccagcatatgggcgatattgttgcgatagtaggtcatcagcaccgcctgctcgcgcggcaggatgatgatgtcgccaatggtgtccttctccacttcgaacttgttcatctgcagcgcatgatcgatgagctcgctggccgaagcggatggggcggtcgcatccggagaatagggcacattgcgcagcagcgcgaggtagcactctaactgctgggtgagctgctcacgggtcagcgaacgctggcgggaggccagtagcgccgtacagcacaggttcatggcgttggccgcgccggcgttattgatgcgcaccatcaggtcagcggcgatgctattcaccgtcggcgtcagccaggaggggcgaaccgcttcgatcgggtcgatcgcttcccgccaatccggcacatgctggttaagataggtcatcagcggcagcggttcgccgaagttaacgtaaccctggcccaggttgcgcagcttgcttaaaccgcgcaccatctgcggcagactctctttctctttagtggcgccgcgcagctctttggcgtaggttcctacctccatcacgtgctcatagccgatgtaaatcggcaccagggtgatcggtcgggttccgccgcgcagcatcgcctggatggtcatcgacagcgtaccggtcttcggatcgagcaggcggccggtacgggagcggccgccttcgacgaaatactccacggaatagccgcggctgaacagttcgccaaggtattcgcggaacacggtggaatagagcttgttgcccttaaaggtgcggcgaataaagaaagcgccgaggcggcggaagatcggtccggccggccagaagttgaggttgatgcccgccgcgatatgcggagggaccagcccctgatggtacaggacgtaggagagcagcagatagtccatgtggctgcggtggcaggggacatagacaatttcatggccgtcgtgcgccagctggcgtacgcgctcggcgttatgcacgttgatgccctggtacaggcggttccaggtgaagccgagaatgcggtcggtcaggcggatcatctcgtatgagaagttcgccgcaatctcttccatcagcgcgatagcgttctgctgtgccttctcgtgcgaaattttcttgctgcgcgcttcgtcttccaccgcgcgggcaatcgctttcgaggccagcagtttattaaacagatcctggcgggccggtagacgcgggccgacggcggccagccgctggcgggcaaaatgcatgcgagcgacgcgagccagcttctgggcgatgatcttatcggtaccgtgctcatccgccatgcggcgcagcgaaacggacggcgagaagcgcacgaaactgtcgcggccgagccaggagacggcgaaaaatttctgaatgccgttcagcatccgcagcggcggattgacttctcctttctcgcgacccggcgaacggccgaacatgaccgaaaccggcaccatttgcacatcgaggtccggatggttgcggtgcagatcgaggtaatcgtggaacagcttgatggactcttcttttggcgtgtaataagtaaatacgcgcggcccaccgtggatgaatacgtaacgcggcagcagggcgccgtcgatttccagcggttcaagcgggtcaggtaaatcatgcgccaggcattgggcgcgcagcgtcagcaggtccgccttcgaattatagggcaggacgtacatgaccggacgcgaggtatcgagtcctaattcctgggcaggctctgccggaatagacttgctttttaccagcacctgtaatggtaaattcagtaatttatagtaaattcgttgccagccggacataaacgatgtgaagcctctggttaatcatgcaaatgcgcggcaagaataacagaaagtgggcaaaatttccgttaccacgcggcaaacgcgcacactcatcgacgtcatttacgtaaaaaggttttgtgatggccaataataccaccgggttaacccggatcattaaggcggcaggttactcctggaaaggatttcgtgcggcgtggatcaacgaggctgcgtttcgtcaggaaggcgtcgccgctatcgtggccgtcgcggtagcctgctggctggacgtcgacgccatcacccgcgtattgctgattggctcggtcctgctagtgatgatagtcgaaattctcaacagcgcgattgaagcggttgtggaccgtatcggctcggattttcacgagctttcagggcgcgccaaagatatggggtcggcggcggttctgctggcgattatcatcgcgctgatcacctggggaacgctgctgtggagccattatcactaacgttcttcgctaaccctcgcaaaatatgaacaatccgccgatttttgtgtgccatgtggttccaaaatcaccgttagctgtatatactcacagcataactgtatatacacccagggggcggaatgaaagcgttaacgaccaggcagcaagaggtgtttgatctcattagggatcatatcagccagacgggcatgccgccgacgcgtgcggaaattgctcagcgcttggggttccgttccccaaacgcggcggaagaacacctgaaagcgctggcgcgtaaaggcgcgatcgagatcgtctccggcgcttctcgcggtattcgcctgctgacggaagaagagcaaggcctgccgctgatcggccgcgtcgccgccggtgagccgctgctggcgcagcagcatattgaaggccactatcaggtcgacccgtcgatgtttaagcccaacgccgatttcctgctgcgcgtcagtgggatgtcgatgaaagacatcggtattctggatggcgatttgctggcggtccacaaaacccaggatgtgcgtaacggccaggtggttgtcgcgcgtatcgatgaagaagtgacggtgaagcgcctgaaaaagcagggcaatgtcgttgaactgttgccggaaaacagcgagttttccccgatcgtcgtcgatctgcgccagcagagttttaccattgagggtctggccgttggcgtgatccgtaatggagaatggctgtagcgcctgcctctgcgcagcgtcatctgttgcgtgacgctgcgacgtttttcctcaatcaggtcctcaaacatgctgctcaacgctgccgataaagcgctgtggcgtcttgccctccctatgattttctccaacatcaccgtcccgctgctggggctggtggatacggcggtgatcggccacctggacagcccggtatacctcggcggcgtagcggtcggggcgacggccaccagtttcctcttcatgctgctgctgttcctgcgcatgagcaccaccgggctcaccgctcaggcctggggcgccaaagatccgcagcgcctggcgcgggcgctggtgcagccgctggcactggcgctgggcgccggggtgctgattatcctgcttcgcctgccgctaattgacctcgctctgcatattgtcggcggcagcgaggcggtgcttgagcaggcgagacggtttctcgaaattcgctggctcagcgcccccgcctcgctggccaacctggtgctgctcggctggctgctgggcgtccagtacgcccgggcgccggttattctgctggtggtgggtaatctgttgaatattgtgctcgatctgtggctggtgatggacctgcggatgaacgtccagggagcggcgctggccacggttaccgcggagtacgccaccctcattattggcctgctgatggcgaagcgggtgctgacgctgcgcggcgtgtcgctggcgatgctgaaaaacgcctggcgcggggatctgcgccgtttattggcgttgaatcgggacatcatgctgcgctctctgctgctgcagctgtgctttggcgcgctgaccgtattcggcgcccgtctgggcagcgacatcgtggcggtgaacgccgtactgatgaccatgctgacctttaccgcctacgcgctggatggctttgcctatgccgtggaggctcactccggccaggcctacggcgcgcgcgacggtagccagttgctggaggtgtggcgggcggcctgccggcagtccggcatggtggcgctggcgtttgccctgatttacagcctggcggggcagtacattatcgcgttgttaacctcactgccttccctgcagcagctggccgatcgctatctgatctggcagacgatcctgccggtggtcggcgtctggtgttatctgctggacggcatgtttatcggcgcgacgcgcggcgctgagatgaggaacagtatggcggtcgccgcggcggggtttgccgtgacgctgcttacgctaccggtgcttggcaaccatggtctgtggctggcgctggcggtgttcctcgccctgcgcggcctgtcgctggcgctgatctggcgtcgacactggcgaagcggcacatggtttagttagttatctcccgtcattgccgctagccgtgaccttccccggtcgcgctacgcttacagggcgattcaatagcccggctcagcgtggcgcaagccgggaacatcctcttcgcgttatcccgcggtgcgatggttaaaaattccgaataacgaatcgacgccagcattctcatctatagttaataccatgtccggcacaaaacgggctgtaaacccaccgaatgatgaggacgttattatgaataaagacgaaatcggcggtaactggaaacagtttaaaggtaaagccaaggaacagtggggcaaacttaccgatgatgatatgaccgtaatcgaagggaagcgcgaccagctggtcggcaaaattcaggagcgttacggctatgagaaagatcaggctgagaaagaagtctcagactgggagcataagaacgactatcgctggtagcgttccttgatccgaagaatgaagcatttgtgttagtgcctgtctgaatggcgcacggacgcgccgttaaccctttttcccgctgcggcagccgctcagcgggctttctttttgagctgaatagtatgatcgtgctggcagtgtcctggggtgctgcaggcttcgacttccacgcagcccgcgcaaagcccgtgagcttctatcacattgtggcgcagggcaaaccccatgcgggccgccagcgtatgcatgatatcttccaccccttccgccgcttcttcttttaccacgccgcagcggtcgcagataaacatggccgagctatgggtcggctggtcgaacagatggcacagcacatagctattggttgactctaccttatggacaaaaccctgctcgagtaaaaactccagcgcacggtaaaccgtcggcggcttcgcctgcggctctttctcacgtagcaagtccagcagatcgtaggcgctgattgccccttgctgcaggctcatcaggcgcaacacttccagacgctgtggagtcaggcgtacgccgcgctgtgcgcaaagcttttcagcatgcgctaacatctcttgcgaaggggtcttatccatgagcatcctcgggttgcgtgaatttgaatctgttactttatcacgttcctcagaaaacaccgagagccggcaggtgatacgggtcatacttcaggttgtcggcaccggcgcccgtcccgggcgctggccgcttattctcgagcagactacgccttagccgctcgctaaaaccaccatgtccgatttaatcacaacacgcccgaccctgggtatgctatatctgaagtgtctcattttcgggagaaaacgatgaaacgacctgattgcattcgccactggcgcgaactggaagggcccgacgatgctacttatcccgacagcccggagcgtttttcaatcggcgcgccgctggggcgaggtttacgtctcaaccggctggggatccaccacgagcggctgccgcccgggcggcgcacctcttatccacacgcggagagcgatgaggaagagttcatctacgtgctggagggctatccggaagtgtggataaacggctatctctggaagctggagcccggcgacagcgtgggttttcccgctggtaccggcatctgccacacctttctcaataacaccgagcaggaagttcgtctgctggtggtgggcgaggccaacaagaagtacaaccgcatttattacccgctcaatcccggctatgccgcgacgcgccaggatcgttgggttgaccatccgccgcagttcttcggtccacacgacggcaagccgcggaaaaagtaatcatttcaggtgaggggcgaagcgcggcgcactatgcgcctgtggtgtatctttatgctatagtagcgcccctttttacccggatgcttatttattcgccatgatgcctgaatcaacgtcacctgttttccctgctcaccgcttctccatcgcgccgatgctcgactggaccgaccgacactgccgctacttcctgcggctgctgtcgcggcatacgctgctgtataccgaaatggtgaccaccggggcgattattcacggcaaaggggactatctggcctatagcgaagaagagcacccggttgctctgcagctcggcggcagcgatccccaggccctggcgcagtgcgcgaagctggccgaggcgcgcggctatgatgagatcaacctcaacgtcggctgcccctccgaccgcgtgcagaacgggatgtttggcgcttgcctgatgggcaatgcgctactggtggccgactgcatcaaggcgatgcgcgatgtggtgtcgattccggtcacggtgaaaacccgtatcggcattgacgaccaggacagctatgagtttctgtgcgatttcattgagacggtctccggcaagggcgagtgtgagatgtttattattcacgcccgcaaagcctggctctccggcctgagtccaaaagagaaccgcgagatcccgccgctggattacccccgcgtctggcagctgaagcgcgatttcccccaccttacgatggcgatcaacggcggcatcaaatcgctggacgaagccagagtacagcttgagcatatggatggggtgatggtcgggcgtgaggcctatcagaacccgggcattctggcctcggtcgaccgcgaaattttcggcgtcgccggcgcggatgccgatccggtagcggtggtgcgagccatgtacccctatattgagcgcgagctcagcaagggcacctatctgggccatattacccgccatatgctggggctgtttcaggggatccccggcgctcgccagtggcgtcgctacctgagcgaaaatgcgcataaagccggcgccgatattgcagtgctggagcatgcgctgaagctggtggccgataaacgttaatttctgaccaaaacctggtgaaattgaccacgcctcgcgcactgacgcggggcgttttcttttaaagtcaagtgcttatgtttggcatgctttttgtaatacctgcagagtgaagtattcattttttgggagagaaccatgctggaactgctatttgtcattggattttttgtcatgctgctggtcaccggcgtatcgctgctggggattatcgcggcaatcgtggtggcgacggcgctgatgttcgtcggcgggttgttcgccttgatgatcaaattactgccgtggctgctgctggcggtggcggcggtgtgggttattcgggcgctgaaatccccgaacggaaatgcttttcgcgacaataaccgttggcgttactaaggtattgaggggtgcgtcacaacctgaacaattttgcagacaaccgcgtaggcattgctgcgcaaatctgtcactattagcgcgttaacgaattcatcgcgctgtaccctacatacagccgaactaaaaaaaagtaagggcttcccagctggaagccctaaacttttgccccttctgccaacttatggcagcagcaaactcgaaccctgcgtcacccggctctccagaacttcatgcgcccgccgcgcttcgctcagcggatagatctgactttcagccacgtccactttaatcaccccgctggcgatcagcgaaaacagttcactgcaggcttcctccagttcttcccggttggtgatatagccctgcagcgatgggcgagtgacgtacagggagcctttttgattcaggatccccagattaacgccggtcaccggaccggaggagttaccaaagctgaccatcaggccgcggcgctgcagacagtccagagaggcctcccaggtatctttccccaccgagtcgtagacgacggccactttcttaccgtcggtgagcgccttgagccgctccacgatagactcctcgcgatagttaatcacctgccaggcgcccgcctctttggcgcgctgcgctttctgcgcgctgccgacggtaccgataagtttcgcccccagcgctttcgcccactgacaggctatcagccccacgccgccagcggccgcgtgaaacaggaacatctcatcaggcttaatttcataggttttgcgcagcagataccagaccgttaatcctttgaggaacgacgcggcggcctgttcgaaagagatagcgtccggcaggaccgccgctttgtcggccagcacattgtgtaccgtgctgtaggcgccgagcgccgactgggcgtacaccacccgatcgcctaccttaatatgcgtgaccccatggccaactttactgacgatgccggccgcctcggtgcccaggccgctcggcagcgacggcggcggatagaggccgctgcgaacataggtgtcgatatagttgatgccgatggctttgttttcgacctgaatctcatgttctgcgggatcgcgtggcgtgaactcaaccgcctgaagcacctccggtcccccgtgtttcgaaaattcgatgcgtgttgccatgttcgctcctgtgttgttccgagattattcagtaagcttaacagcctgcgccggcggcgacggattttcttacccgcctcaggcctgccacgcttaatgggttctttagcggcaatggctttctcgctatactgtcacgctcttttccggatcggtgaaatgttaggctatggcaggaaataaacccttcaacaaaccacagacagaaacccgcgaacgcgatccgcagctcgccgggctgaaagtcccgccgcactcgattgaagcggagcagtcggtgttgggcggtttaatgctggacaacgagcgctgggacgacgtcgccgaacgcgtcgttgccgacgacttttatacccgtccgcaccgtcatatttttaccgagatggcgcgcctgcaggagtccggcagcccgattgacctgattacgctcgccgagtcgctggagcgtcaggggcagctggacagcgtgggcggcttcgcctatctggccgaactgtccaaaaacacgcccagcgcggctaacatcagcgcctatgccgacatcgtgcgcgaacgcgcggtggtgcgcgaaatgatttcggtggccaacgagatcgccgaagccggcttcgacccgcaggggcgaaccagcgaagatctgctcgacctcgccgaatcccgggttttcaaaatcgccgaaagccgggccaacaaagacgaagggccgaagaacatcgccgatgtcctcgatgccaccgtcgcccgtatcgaacagctgttccagcagccccatgacggcgtcaccggggtcaataccggctacgacgacctcaacaaaaagaccgccggcctgcagccgtcggatctgattatcgtcgccgcccgtccatcgatgggtaaaacgaccttcgcgatgaacctcgtggaaaacgcggcgatgctgcaggacaaaccggtattaatcttcagtctcgagatgccctcggaacagatcatgatgcgttctctggcctcgctgtcgcgcgtcgatcagacccgcattcgtaccggtcaactggacgacgaagactgggcgcggatctccggcaccatgggcatcctgctggaaaagcgcaatatctatatcgatgactcctccggcctgacgccgacggaggtgcgctcccgcgcgcgtcgtatcgcccgcgagcacggcggtatcggactgattatgatcgactacctgcagctgatgcgcgtgccgtcgctctccgacaaccgtacccttgagattgccgaaatctcccgctcgctgaaggcgctggcgaaagagctgcaggtgccggtggtggcgctgtcgcagcttaaccgctcgctggagcagcgcgccgataagcgcccggtcaactccgacctgcgtgagtccggctctatcgaacaggatgccgacttaatcatgttcatttaccgtgatgaggtctatcacgagaacagcgatcttaaaggcatcgcggaaattatcattggtaaacaacgtaacggtccgatcggcaccgtgcgactgacctttaacggccagtggtcgcgtttcgataattatgccggtcctcagtatgatgatgagtaatccttccgccttcttttattaaggaattcaaatgcaagcggcaactgtagttatcaaccgccgcgctctgcgacacaacctgcaacgtctgcgtgaactggcgcccgccagcaaactggttgcggtagtgaaagcgaacgcctacggacacggtcttctcgagaccgcgcgaacgctgaccgacgccgacgcctttggcgtcgcccgcctggaagaggcgctgcgcctgcgagcggggggcatcgcccagccgatcctcctgctggaaggcttttttgctgcggaagacctggcggtgatcgccgcccagcgcctgcatacggcggtgcatagccccgaacagctggcggcgctggagcaagccgatctccccgagccggtgaccgtgtggatgaagctggataccggcatgcatcgcttaggagtgcgcccggaggaagccgaggcgttttatcagcgtctgagccagtgtaaaaacgtccgccagccggtgaacgtggtgagccacttcgcgcgcgccgatgagccgacctgcggcgccaccgaacgccagctggacatcttcaccacctttaccgaaggcaagccgggcttgcgctctatcgccgcctcgggcggcattctgctgtggccgcaatcgcattacgactgggtgcgccccggaattatcctgtatggcgtgtcgccgctggacgatcgctccaccggcagagatttcggctgccagccggtgatgactctatcgtccagcctgattgcggtgcgcgagcataaagcaggggagcccgtcggctacggcggcacctggatcagcgaacgcgatacccgtctcggcgtggtggcgatgggctatggcgacggttatccgcgcgcggcgccgtcgggcacgccggtactggtcaatggccgggaagtgccgattgtcggccgggtggcgatggatatgatctgcgttgacctcggaccgcaggcccaggataaagccggcgacgcggtagtgctgtggggagaggggctcccggtagagcgcatcgccgagataacgaaagtgagtgcttacgaacttattacgcgactgacctcccgcgtcgccatgaaatacttcgactaagcctctggcgtaccggatagcacagaggctgatccggtacgcaccaggcctgcggcgctcaaaaaagcggtttataccgctgcgcggtcactttcccctcaacatcctctcgacctgccgtcatatccggtttattgtgtaagaacctgccccatgtaaacctggagatacatcgcgtgtttcaaaaagttgacgcctacgccggcgaccctattctttctctgatggaacgcttcaaagaagacccgcgaagcgacaaagtcaacctgagtatcgggctgtactacaacgatgacggcattatcccgcagctgcaggcggtggcggaagcggaagcacgcctgaacgccgagccgcatggcgcctcgctgtatctgccaatggaagggttgagcggctaccgtcaggcgattgcgccgctgctgtttggcgcagagcataccgcgcttaagcaaaatcgcattgcctctattcagacggtcggcggttcgggcgcgctgaaggtcggggccgacttcctcaaacgttactttcctgagtctcatgtctgggtcagcgatccgacctgggaaaaccacatcgccatttttgaaggggctggcttcgaagtaagtacttacccctggtttgataaagccaccaacggcgtgcgctttgaggacctgctggcgacgctgcaaacgctgccggcccgcgatattgtgctgctgcacccttgctgccacaacccgaccggcgccgacctgacgccagcccagtgggaccgcgtggttgaggtattgaaagcgcgtcagctgatccccttcctcgacatcgcctaccagggctttggcggggggctggaagaggatgcctacgctattcgcgccatcgccagcgccgggatgccgatgctggtcagcaactcgttctccaaaattttctcgctgtacggggagcgcgtcggcggtctgtccgtggtctgtgaagacagcgaaaccgcgggccgcgtgctggggcagctgaaggccaccgtgcgccgcaactactccagcccgccgagctttggcgcgcaggtggtggcgacggtgctgaacgatgcagctctgaaagccacctggcaggcggaagtggacgccatgcgcgcgcacatcctgaccatgcgccaggcgctggtcgacgcgctgcagcaggttgccccgggcagcaaagtggattacctgctcaagcagcgcgggatgttcagctataccggatttagcgcggcgcaggtggatcgtctgcgcgatgagtttggcgtctacctgattgccagcggacgcatgtgcgtggcggggttaaactcacgtaatgttcagcaggtagcgaaagcttttgccgcggtaatgtaagccgctctccagcaggttgtctctgccggtcaacgggcaggggcaacccctcggatgtgatcatcctctttttctatgacatctgcgcgaaaaaggcttttcatccatgccgccggcgggtaaggtcgggacgttgataagcatgcacattattgaaaacaataatgattgatagatttagggataaatatgcgcaaacttactctcgcccttgcggcggcttctctcctgttcacgctgaacagcgccgttgtggcgcgcgcctccacgccgcagccgctatgggtcggcaccaacgtggcccagctggccgagcaggcgccgatccactgggtttcggtggcgcaaattgagaacagcctgctggggcggccgccgatggccgtcggctttgatatcgatgacaccgtcctcttctccagtccgggtttctggcgcgggcaaaaaaccttctctcccggcagcgaggattacctgaaaaacccgcagttctgggaaaaaatgaacaatggctgggatgaattcagcatgccgaaagaggtggcgcgccagctgattgcgatgcatgtgaagcgcggggacagcatctggttcgtcaccggccgcagccagaccaaaaccgaaaccgtttctaaaaccctgcaggatgattttctcatcccggccgccaatatgaatccggtgattttcgctggcgataagcctggccaaaacaccaagacccagtggctgcaggcgaagcagataaaggttttctacggcgattcggataatgatatcaccgccgcccgcgaagcgggcgcccgtggcatccgcgtgctgcgggccgccaactcctcctataagccgttgccgatggctggcgcgctgggcgaggaagtaatcgtcaattccgaatactgatgaccgcctgaacgcgataaacggcagcgacggcgctgccgtttttttatgcaaaatcaggggtggaaggttttaccttttcacgtattgctgcacacttagaaggattcattcgcaaaaggagtcaatgatgtggtatcagcaaaccctgacgcttgggccaaaatcccgcggttttcatctggtcaccgacgaaatccttggccagatccgcgggctgtccggggtgaaggttggcctgctacacctcctgctccagcatacttccgcttccctgacgctcaacgaaaactgcgatcccaccgtccgctatgacatggagcagtattttctcaacgccgtaccggacaatgcgccgtatgaacatgactatgaaggccctgacgatatgccgtcgcacatcaaatcatcgatgcttggcgtgtcgctaatgctgccggtcgaggacgggcgcgtcaggttgggaacctggcagggcatctggctgggggagcatcggatacacggcggttcgcggcgcatcgttgcgacgctcatgggggaataaaagatgacaatttcggagttattacagtactgcatggcgaaaccgggagcagagcagagcgtccacagcgactggaaagccacgcagattaaggtctcagacgtgctgtttgccatggtgaaggaggttgaggaccagcggccggcggtcgcgctgaaggcgagtccggagctggctgagctgctgcgtcagcagcatcgcgatgtccggcccagccagcatctcaataaagcgcactggagcaccgtctatctggatggctcgctgccggattcgcaaatctactatctggtcgatgcgtcttatcagcaggcggtgaaaatgctgccggagccggtccggcagcagcttacccgctaattatttcagcatgggcttgaggaagcgcgcggtgtgcgaggcttcgcactcggcgacggtttccggcgtaccggagaccaggatttcgccgccgccgctgccgccttccgggccgagatcgacaatccagtcggcagttttaatcacatcgaggttgtgctcaatcaccacgatggtattgccctgatcgcgcagctggtgcagcacttccagcaactgctggatatcggcgaagtgcagaccggtggtcggctcatcgaggatatacagcgtctggccggtaccgcgcttggacaactcgcgcgccagcttcacgcgctgcgcctcgccgccggacagggtcgtcgccgactggccaaggcggatataggtcaggccgacgtccatcagggtttgcagcttacgcgccagcgccggtacggcatcaaagaattcacgcgcctcttcaatggtcatatccagcacttcgtggatggtcttacccttgtacttaatctccagcgtttcgcggttatagcgtttgcctttgcactggtcgcacggcacgtagatatccggcaggaagtgcatctcaaccttaatgacgccgtcaccctggcaggcttcgcagcgcccaccgcgaacgttaaagctaaagcgccccggcgtatagccgcgtgagcgagactccggtacgccggcgaacagctcgcgcaccggggtaaacaccccggtataggttgccgggttggagcgcggcgtccggccgatcgggctctggtcgatatcgatcactttatcgaaatgttccagcccctggatatcgcgatacggcgctggttcagcgatggtcgcgccgttgagctggcgctgggcaatcgggaacagggtatcgttgatcagcgtggatttacccgagccggagacgccggtgatgcaggtaaacaggcccactggcagggtgagcgttacatccttcaggttgttgccgcgcgcgccggtcagtttgaggactttctccgggttggcgggcacgcgctgcttcggcacttcaattttgcgtttaccgctcatgaactggccggtcagggattccgggaccgccataatggcctccagcggcccttccgctactacctggccgccgtgaacgccagcgccgggaccgatatcgatcacatggtcggcggcgcgaatggcgtcttcgtcgtgctcaacgacgatcaccgtgttgcctaaattacgcaggtggatcagggtgccgagcaggcgttcgttatcgcgctggtgcaggccgatagagggttcatccagcacgtacatcacgccaaccagcccggcgccaatctggcttgccagacggatacgctgggcttcgccgccggagagcgtttccgccgagcgggagagcgtcaggtagttgaggccgacgttgacgaggaatttcagacgatcgccaatctctttcagcactttttcggcgattttcgcccgctggccggagagcttcagattgttgaagaaatccatcgcatggccgatgctcatatcggagatggtcggcagcggggtgttttccacaaacacgtggcgcgcctcgcgacgcagacgcgtgccgtcgcagctggcgcacggacggttgctgatgaacttcgccagctcttcgcgcaccgcgctggattccgtctctttgtaacggcgctccatgttatgcagcacgccttcgaacggatggcggcgcaccgaggtatccccgcggtcattcatgtatttgaattcaatactttctttacctgaaccgtacagcaccactttctgcacgttggcgctgagggtgccccatggcgcttcgacgtcgaatttatagtgctccgccagcgacttcagcatctggaagtagtagaagttacgccgatcccagccgcggatggcgccgcccgccagcgacagctcgggattttgcaccacgcgatcgggatcgaaatattgctgcacgccgaggccgtcgcaggtcgggcaggcgcccgccgggttgttaaaggagaacagacgcggctccagctcgcgcatgctgtagccgcagatcgggcaggcgaagttggcggaaaacagcagttcttccgctttctcatcatccatattagccacaatggcggtcccgccggagagctccagcgcggtttcgaacgactcggccaggcgctgcgccagatcgtcgcgcaccttgaagcggtcgatgactacctcaatggtgtgcttcttctgcagctccagcttcggcggatccgacagatcgcagacctcgccgtcgatccgcgcgcggatgtagccctgactggcgaggttttccagggttttagtgtgctcgcctttgcgctctttaataatgggcgccagcagcatcaggcgcaggccttccggctgggcgaggacattatcgaccatctgactgacggtttgcgccgccagcggcacgtcgtgatccggacagcgcggttcgccgacgcgggcgtacagcagacgcagatagtcgtgaatttcggtaatagtacccaccgtcgagcgggggttgtgagaggttgatttctgttcgatggaaatcgccggcgacagcccttcgatatggtcgacgtccggcttctccatcagcgacaggaactgtcgcgcataggcggagagcgattcgacgtagcgacgctggccttcggcatacagggtgtcgaaagcgagtgaagatttgccagacccggaaagcccggtgacgacaatgagtttgtcgcgcgggataacgaggttgatgtttttgagattatgggtgcgggcgccccgaacttcgatcttatccattcacctttcccggtaggtagatacacggattgcctggtttgcttgaaggacaaacggcagaaacggctaattatgacacaatttaacctgaatgaatatacagtatcggaatgcaaattcgggtcgagtgtgcaacaatgccgtagccgggtactatctctggaatcagcctcgcagctattaaaatgctacgtggaaatggtacactcgcgcgtttacactattaagaaacgtattcaggagacacgaacatggccagcagaggcgtaaacaaggtgattctcgtcggtaatctggggcaggacccggaagtacgctacatgccaagtggcggcgctgtcgccaacttcacgctggcaacttccgaatcctggcgtgacaagcagaccggcgaaatgaaagagcagaccgagtggcaccgcgttgtgctgttcggcaaactggcggaagtcgctggtgagtatctgcgtaaaggctctcaggtgtacattgaaggccagctgcgtacccgcaagtggaccgatcaatccggtcaggacaaatacaccaccgaagtggtggtgaacgtgggcggcaccatgcagatgctgggcggccgtcagggcggcggcgcaccggcaggcggcggccagcagcagggcggttggggtcagccgcagcagccgcagggcggcaaccagttcagcggcggcgcgcagtcccgtccgcagcagcaggccccggcagcgccttccaacgaaccgccgatggacttcgacgacgacatcccgttctaaggcttgccttaggcgcactgtctgcgcagtcgaaaacagaaagccccggtttcgccggggctttttctttgttattcctgcaccgtcatttcaggatggaatttgacctacggtaacgagcgattcagatgacgggcacctgagcggtggcggctgtcgccacgctgggctgcggtttggctggctgcgccaccggctcctgccgcggtacggccgtcgctttctgtttgcgggccatgtcatcgacgatcagccgataggcgatgtaatacttatagatattgctgacgtaggttaccgtctcggcgccaattttttctgccgccatattttcgacgttaccgaaccagacgttcgggtcaaatcctcgctgtttagtcatggtgcgcaggcgggcgatacgcgccggacccgcgttataggaggcaaaggtaaacagcgctttatcgagccgggtcatgggctcatcggcatagtaccgatccatcatccagcgcatgtatttcacgccggcatggatattgggatccagctgtttaatatcgcccaccttcagctcttttccagtgctgggcatcacctgcataacgccgatggcgccgacgtggctccgtaccgactgattcagccgcgactcctggtatccctgggccgccatcagcagccagtcgacgtcgtaacgatcgccgtacttgcggaagacatctaccatcgcgaggaatttgcgtcgttccttactcgccgcggcatttttgacatatttagcatttttcaggtaacgcagcaggagagtattgcccagcgtggtgccctgacgattctttttgacgaagttgttcagtaccgtcagcagctgcgagctgtctttgcgtaccgcccaggcaatgtcgccgccgtcgcgcagcaccacattgtcatggacctgaatttttggaaacacctgtttccagaacaacgctttatgctgatcgacgacgatcagcggaatcagcccggcgttgagcatttccagcagatcttcatcctccagcgcttccggcgccgcctccagtatcaccggtgggcgcgactcaccggcaaatcgggcgttcagcgcttgcaggctgtcgtaatagctggaggagcggcgaacaaagacggtttgaccagagagttgctccaggctgtcgaccttcggtgaagccgggccggagatcagtaattctttcacgttgctgtagagcggctgggcgaaatcgacctgtgcttcccgcgagggcgtgatagtcagattggcagccgcaatatcgcctttaccttcattaagcgcgataaagagattgtcccgactgaccggcacaaaaacgatatgcagcttcaggtggcgctgtttgagctttttatccttcgctagctgtttattcagctcgttttccagcgcgataaaaatgtcgtgcgtcgccccgcgctgggtgcctttatcaataaaaaagaaggtcttgctgtaggtggttaatacccgaatggtacgacggtcgatcatgccaggcaaatcgcctctccatggccgtagcatatcgtcgatatgaatcgatagcgtgttgtcttcggctgctgccggcggcgctttttccgcctctactgccggcagcagaggagcgaataacagtgtcgcgaggcaggtgagccaggcgataaacagacgtgatagcgagtaggcgttcatggaggaatactccgcaggggatgtgattattttagcagaacggccgccgttagctgggaacgacaagggcgtaaaaaacataacaatgccgacaaatagttttctcccattttatcgcttactattaatgtgtttttatctttaatttaactatggagataatatggcgaaaatgtgtgtttttaatgataaatagaaaataatgatgatgtttttattttatttctccccatctgttttgttgtaaccttttgattgttagtgtttattttatttttctccgatgttgattattatcatcttgataatgaatctcatttttattaccgtaacacggcacattactctaatgacacgctgtctggattacgctatcaaagaatagcgcgcagcgctttttctctaatgatgaaacagggcacttaattttattatgcctcacgcttttttttattcccattaatgccgggaaggcgctgacctgcgccaaaatctggcgacgcgctgaggcaagtattttatcccattgttttttcaattggggaaggcgttatgcccgacagcaacagaaaacagggcatattctatgaaatacacgtctcacttcccgctggggatcgtcattcctctgctcgcctgtagcgtgccgctgcaggcggcagagaacatgaccgaacaatcgacgcctgacgagagcgccgccactgccgaaaatcacgaggagacgatggtcataaccgccgccaggcagaacctgcaggcgccgggcgtgtcgaccatcaccgcagaagagatccgcaaacatccccccgcccgcgatgtgtcggagttaattcgtacgcagcccggggtaaacctgaccggcaactccaccagcgggcagcgcggcaacaaccggcaaattgatatccgtggcatggggcccgagaatacgctggtgctggtcgatggtaaaccggtgaccagccgtaactcggtgcggtatggctggcgcggcgatcgtgactcccgcggcgataccagttgggtgccagcggagatgatcgatcatatcgatgtgatccgcggcccggcggcggcgcgctatggtaatggcgcgatgggcggggtcgtcaacatcgtgaccaaaccgaccacgcgagaatggcacgggtcgtggaatacctatatgaatgctccgcagcaccgtaaagaaggggcgacgaaacgtactaactttagcctcaatggtccgctgtcggacagtgtcagcttcaatctctggggtaatctgagtaaaacccaggccgatgcacaggatattaacgccgggcatgaagcggaacgtaccggttcctacgccggttcttatcccgccggacgtgaaggggtggtgaacaaagatattcacagtaagctgcgctgggagtttgccccgatgcaggccctggagtttgaggccggttacagccgccagggtaatctctatgccggcgacacacaaaacaccaataccagtgcgctggtgaagagtatgtacgggaaagagaccaaccgtctctaccggcaaacttacggtgtaacatggaccggcggctgggataatggcgtgaccagcaacagctatgcccagtacgaacacacccgtaactcgcgaatggatgaagggctggcgggcggtacggaagggatcttctccagtagcgagttttcagatattgatctggccgatgtcctgctacatagtgaagtgaatattccgtttacgctgggggtcgatcagaatctgacgctggggacagaatggaatcagcagcggatgaaagatggcgtatcgacaacccaggcgctctcttacggcactatcgatggcgtatcggctaccggtcgtagcccgtactccagcgccgagatcttctcgctgtttaccgaagataatatggcgctaacggacagcaccatgctgacacccgctctgcgcttcgatcaccacagcatcgtcggcaataactggagtccctcactgaacctgtcccaagagctgacagacgactggacgctgaagctgggcattgcccgcgcttacaaggcgcctaacctctaccagttgaacccgaactatattctctacagcaacggtcaaggctgttacgccagtagttccgcctgctatctgatggggaatagcgatctgaaagcggagaccagcgttaataaagagattggtcttgagtacaagcatgatggctatcaggcggggatcacctggttccgtaacgactatcacaataagattgagtcagggtatgcggcggtgggtaccgccagcaacggcaccaccaatatctatcagtgggaaaacgtaccaaaggcgttagtggaaggcctggaaggaacgctgaatctgccggtgggggaggcggttaactggagcaataacctgacctggatgctgcagagcaagaataagacgaccggcgaccgactgtcagtgatcccgcagtttaccctgaactcgactttgagctggcaggttcgtgaagatctctccctgcagagcacctttacctggtatggccgacagaaaccaaaacgcttcaattataagggcgaggcggtcagcggcagcgaactaaacgaagtcagcccatacagcattgtcggcctcagtgcgacctgggaagtgaacaaaaatctgagcttcaccagcgggatagataacctgtttgatattcgccactaccgggcagggaatgcgcaaacgaccggcaacgcgacgacgggagcttatctgtatggcgcgggtgccgagacctataacgagtcggggcggaccttctttatgagcgttaatactcatttctgatgatcctgatgaggagtaaaccgggtgcagcgcgacccggtttttttatttcagatgagagcggaggaggcggttataaatcgtgacaaaatcttcacgccctctacattattagctcaacatatccttttatactgatttccgtcgcgcaaggtcgttgatcccgaccgggctcgataatagcatcctgctatttcccttctgtaatatcccctgtcccccttccattcccaaccgcagcgatgcggaggagggggacctccttatttttgccgcgtgctctgatagcgatactgagtgggcgtgagcgcatgatattttttgaaggtacgattaaacgcactgagatcgtcataaccgaccatcatacaaatatcgacgattcggtaaccaggcgttgtcagtaataaacggcaacacagcgacatgcgctgctggcggatatattccattggcgaacgatcaaaataatgacggaagagccgaaacaaatgccagggggaataaccagagatatcgctcagatcgtcgacggtcagtttcttatccagattattatcgatccacaagagcaggtcgcttaagaccgattgctggagcgttttgctacgcataattgcggccaatcccataacgcagggctcctcagtgaggagcccaggggtttattgaacagtgagtatgccgtggcgaacctgataatttttttgattatcagggccaatatagtcgctggcgggttttgccagctgcagatgaccaaaggcggtagtttgctctgcatgataattttcgccgtcattcacgtcgccgcgcccgttataatgggcaatggccgggaagggatacaccggacgagtcgcgataaccgctggagcggcgtcagcgtaaggctgactgactttctgcacgccgtgaaactgcgtttgcgcatctggtttttctgtcatcggcggcaggtcggcagcggctgttgcccgtttgccggccatgatctcctgcggcgcgataccttcctcggtccagcgcatcagcggagtaaggagatcaatttgatcgtaaccttcgccattaccgcaatgggctaccccaggcagcaggaataaccgcaggaaggtatccgttgcggcatggcccatctctgcttctacgccgcgataataggcgatagaaaaggccggactgacggagtcatcggccagaccgtgccagaggataagcttgccgccgcgctgttgataggcatgaagattggtatttgccgcgttatagagcggcgccagttgggcgacggcgtcaaaattctgctggttaagcgggaaatcccgcatcgattggatcttctgtttttctcctggcaggagcacggattgcagagccggtagtaccatcatttccgacattgagtggccggtcggcgtctcgggcaccggccagcgtagctcggaacccagcggcagaccgcccgcgacgaactgggcgccgtggctgtcgtaagcgccgcggtagagctttttcaccacctcgatctcttcctgcgtcaggcaggtagaacggtcccgagcatcggcaggacagcgggggagccatgactcagagaactgacaggcatacggattttgcaggataccatcctgcacgccggaaagcgtcgggcaatgagccagcacggcctggtgaatcagaggaaggcgatttttcagcaggatagcggtaccgtccgggcgctgattggcggccacattccagccgtggaagaaggagttctgaaactggaaaaaggccgctggcgcgccagcgctgataccgtcaaaatcctgcggaaagcgctgcgcttccatcaatgcttcgcgaccgccgtctgagcagcccataaagtaggcatactttggcggctggcggtaaagcgtctgcatcaccgctttggccagcacggcggtcaggtggttggcgcgccaggcaaaatcgatgcgcttttgcggatcttcggcccatgacgcatccatcatactgccatggtgccccatatcggttgctgccaccacaaactcgccgttcattgccggcaggcagccgctggcattcgacagactcaggttaatactcccgcacagtccgccacagccgacctgcaaaaaacgttgactccagcgttgggtcggcagggcaatctgcacgccaatctcaggggcgatagtggcgctcaccttgcaccagcttccctgcgcggaggtctgcatttcagtgtgattgatagtgacctttgcgccaacggccgcgctgaagtcggtagcgcttagcgcatcgcatgtcagcgcgggaagaacgatcggcagactggcgacagcctgcgtgggtgaagcgaacgataacccgaagagggcgcagaggatgatgggcaagattgtcttgagtaagcgtgtcatacgcagttccctgtggctgatgatgggaggcggcaggatggcgaaacctatgcctcaccttccctggcgaggcgccactgcttggctattgtagataacgatagactttccttgatgccttgataaggcgaccctactgtattctgctattttgaggaaaatatggagatgtttgccaacggcgtctggcggtgaattcggggtagaatgttgtgatatcagttgcataatttattcaatttctcttcattaaatctgctgggttgcaggttatttttctccctgttcctggtgatcccagagagcatcattcctaacgagatccttccccctttccattaataagaaagggggctttttattaataaaacgttcaggcaaatctaaatatagtactggtgttggccattagaaccatgcgcttcagaaaaagttccatcattaaatatatttttaaagatgctttaacatccattttttctccattttgtcgccataattgcatgtaattctgcgcctcgctcaggttattttctgtcgcatattttagagatgcatcctgaacaaataagctcaacgccagcaggacactgctattgctcattatctcgtagacgacacattcatgttaaaaaagactcatatcatcagcggattattgatcacccctttaacgttatatgccgcaacatcatatcaagttgatgatatccgttttgaagggctacagcgcgtgaccgtcggggcggcgctattaagtatgccattgcacgcgggagatgcggtaacgccagaagatgtcagcgaggcagtgcgcgcgctgtatgcgagcggcaatttcgaaaatgtgcagatcctgcgcgatgggaaaacgctggtggtgcaggttaaggaacggcccactatcgccagcgtcagtttttccgggaataaggcagtgaaggatgatgcgctaaaggaaaatctcaccgcgtccggtatttctgcaggtagcgcactggacagaaattcgcttagcgaaatagaaaaggggttgcaggatttctattacagcgcggggaaatacagtgcgcaggttcacgcggtggtgaccccgttaccgcgtaatcgcgttgacttaacgttcgtctttcaggaaggcatctcggcgaaaatcgcacaaataaacattatcggtaatcaggcgtttcgggaagagacgctcctggaccagcttcagctacgtgataatgtgccgtggtggaacgtggtagccgataaaaaataccagaagcagaagctggaagccgatctggaaacgctgcgcagtttttatctcgatcgcggctatgcgcgctttgctatcgagtccacgcaggtcagtatgacgccagataaaaaatccctgtatatcactatcgccctcaatgaaggcgaacgttatcgggtcgaccgaactcaggtgacaggcgatctggctcagcatgggccggagatcgaggcgcttgcccagccgctggcgggggcatggtatagcggggcgcaagtcaccacggttgaaaatgagatcaaaaagcactttggtaagtatggttatgcctggccgcaggtgacgtccacgccggaaatcgatgatgctcatcaccgcgtggtgctgcatattcaggtcaacgcgggccgccgctactcggtacgccagatccgcttttccggtaacgacacctcccgggacgcggtgctgcgtcgtgaaatgcgccaaatggaaggggcgtggctcaacaacgaaaaagtcgatcaaggaaaggtacgtcttgatcgaacgggtttttttgagaacgttgaacagcagatcgttccggtcaatggaacggcggatcaggtcgatgtggtctacaaggtgaaggagcgcaacaccggctcattcaatgtgggcctgggatttggtacggacagcggcgtgagctatcagcttggcgtgacgcaggataactggctgggaacgggtaatagcgttagcttcaacgggacgcgcaacagctaccagtcttatcttgaactgggggcgacgaacccgtggtttaccgtagatggcatcagcctgggcggaaagattttttataacagctatgatgcttctgatgcggatgccgggagctataaccagcagagctatggtttaggtagtacgctagggtttcccattagcgaaaataactccctgaacctgggactggattatgtccataatcgcctgaccaatatggatccggagctgacgacctggcgctacctcagctctcggggaatcgagcccagcgtggtgacgaaagatggcgacagcggcgcaaaatatagcgccaacgattattttgtgagtcttggatggggctacaacgatctcgatcgcggcttcttcccgcgtgcgggaaacaagagcagcctgagcggtaaagtgacgctccccggttcggataatagctactacaaactctcttttgacaccgcccagtatctgccgctgagcgagaacaagcgctgggtctggatggaacgcctgcgcgcaggctatgccggcgggttagacggcaaaagtgtgccgttctacgataacttttacgcaggcggttcgtcgtcagtgcgcggattttcttctaacactattgggcctaaagcggcctattaccgctgtaacggtagcgaaagcagctatagcgcctgcccgctggacgcctcgtctgatgcggtcggcgggaatgccatggcggtgctgaacagcgaatttatcattccaaccccctttgtgaatgacaaatacgccgatagtctgcgaacctcgctgtttgttgacgcggggacggtctggagtacatcctggcacaacaccgcgcagacgctggcggcagggatccctgactacggcgatccgagtcatattcgtctctccgcggggattgccgtgcagtggatgtctcccctcggtccactggtcttctcctgggcagagccgtttaaaaagtacgatggtgataaagcagaacagtttcagtttaatatcggcaaaacctggtagggctccaacggggcctgatagaccggcgtggctatattctgtggactgtcctccgatatagcgattgagcagaatatactcaaccgctatgtcgatattatcgctaaggaatgcgatctggcgggacacccgcgacatttacccgagcgcggtctgcgggcctcgcggacctggtgacgtacgacgaggtaaccgcgcaataaatagctgcctgctactatcctctcttcttgccaaaccgcgggtaatactcagtgctgcatcatctaataccaatggctgaggcctcatccagagggactaagacgtattgtcaattaagtttatattatcttattttttattatattttcttttttaaggttaatttggctgtttttcatcaggcctaaccataaatttagagagggaaatgaaacgttactaataatggagcatgtcgttaggaattgtcttaaatcacataattgccaggggcgcttgcgatttataacaatgaatgctatcactatatattgtaataatttgtagcatctttataaggaaggaatatgaaatggactattcttaataccctgatctgcccgcaatctggtatcgccttctcggctatatccagtctgcgtttcttgaaatttatcatgtggtacgaggctgatgtaatcctgttgcccggtgagtcgataagactctattcctcgagagttttaattaatgaccagtatcattcattaaaaatctataatattacggtgtacgacgaggcgcagtgggaaaaattacgtgagcgaccatcgtgcccttaccatgccggtggcgagcggtctgactcctgtttttaccagtccttttgcacgattaagcgttgcccgaataatattccccgcagtgaaccctggcgttagccagtccacgccgccggtcagacaccggcggcgtgacgtcatttcgccagcagggcggccagtcgaggctggacgcttgcgcagccggccagcacgaggttgcctcgccgcaggcccgcattggcgagaaacgcattgcacgttccgcccgcctcctcaatcaatagcatgcctgccagcgcatcccagctgttcatatgcgcttcataataggcgtggagctgaccggcggcgacatgcgccagcatcagggcgcccgcgccaaaacggcgatactccagaccggcgtcgagcagcgtgtcgatggcccgggcgtagtcgctggccggggcccggctggagcgccccatgccgatcaccaccgcatcgggctccggctcgcgtagcgtcaggcgccgaccgttgagatacgcgccttcgccgcgggcggcgaagaaaaattcatcgcgatcgggggcgtaaatgatgccgagcgacagttcaccctggcacactcgtgccagtgagatgcaccagtaatccatgccgaggataaagttggtggtgccatcgacaggatccagcacccagacggtctggtcgtcgccttcaaaaccgctctcctcgccgaggaaaccctcctcgggaaagtgggcctgtagccagcctttaatctcttgttctaccgcgagatccgcctgcgacacaaagtcctggcgcgcttttttatcgacctgtaatcccgcatcgcgcagcgcctgggcgtgggcgcctgcctggcgaatcaaggcgcataatgactctcgttgtgcttccgtcatagtcctgctctcatataacaaagggcgacgtgcgccggtgaattaaggttacctccacccaggtggtgcgtgaaggttgcgaagggtcggcggcgcgctccagaagccgggcgagcgcctggcgggcgatcgccgccacatcctgatgtagcgtggtgagctgatagctatattgcgcggtcgtcggcgtgttatcaaaaccaatcagctgaaaatccgccggagcctctctgccgcgctggcgcattccatcgagaaagccacaggcaagctgggcgttggcgcagaagatcccctccagcgcctcgtcggcgagcgccgcagcctgtaacccgcccgcgtaaccttcttgcttacaggcgaggatcgccaggtggcgttcgacgtccactccgcgcgtttgcagcgcccggccgaacgcttccccgcgcatgcggccggcccaggtggaaggatggtggttgagccagccaaagcgctgacagccgctgcgcagcagttggtcggcggccagttcggcgccggcggcgttgtcagaacaaacgtaatccacgccggggatcgtcggctgtcgattaatgcccacgaccggaatatgctgctggacgcactcgttcaccagcgcctccggcggctggccggaggtgacgataacgccggagacgcgaaactgagcgaaacggcgtaaggtctgcgccagatcctgctcgctgtggatctcgctcaccagcgcctgaaagccctggcgctggatctcgttaagcagcgcatcaagcagggtactgcgaaaaggatcactgatgcgcgagacgatcacgccgattaagtggctgcgctggcggttcagcccctgggcgaggaagttaacctgataccccagctcttcggcggcgcgcagtacccgcgcccgggcgtcgggagagatgctgccgttgttgctcaacgcccgggacaccactgcccgggagacgcccgctcgccgggcaacatcctgggcggtgacgctgggtttgcgtgggttcataggaggtacgtctcgtcagtgggcgtgggacgcggcagcgttaaggtgagtccatcccgggaaacgaataagcccggccacggctgacaggcctgctttagcgccgacagagaagcatcctcgcagtgatagagccccatcgccgggagctgcagcgttctgaacagcatcaggcaggaggggaaatcgccatgcgaggcgtcatcgtccagggctgctaccgaggcgcactcctgaaacgccagcccggcgccggccatcagggctatcgagtcggcggtcggtcggccatcgccgctgtaaaacagcgtctgcccggcaatggtgatgcggatggcgcgattactcagctcatgctgggtgggggcagtgcggatctgccagtcctgccacgtccaggcttcgcggcattcctgccagtcgatggtgaaaccaaggtccgcctgcggccagttcgccagcgcggccagctgcatgagcaccggctgctgcgccggctggcagtagataatgactggcttctgacgggaataacttttccagtggttcagtagcgccgtcaggccggtgcagtggtccgggtgaacgtgggtgaagtagatcgcgtcgatatcgttgacctcgccgccgcgctgccagagcgcgcggggaacggtggggccgcagtcgattaaccactgtttgttgtccgcatcgatcacccgcagcgcggaggtattttgcgtgcaggaaaaggcgctcccgcagccaagcacatctattttcatttaccctcgccaaaattttttgccgcttaattaaattgtcataaatacccgacaaagtaggctcacatcatgtcgattcaacgttgcattttttttacagccaaatgaacacgtgttcaccttgctaaaaaaaatgccgcagcagcgctttcaggtagcgaatatgagttatttacagatctccggccttaaaattagttatggcgataaggtggttttacataatatcgatctggcggtagagcagggagagatgattgctctactgggcccgtcgggatgcggaaaaaccacgctgctgaacgccctctgcggctttattccggtgcaaagcggcgaggtggctattgccagccgaacgatcactcatcttgcgccggagcagcgcaatatcaccatggtatttcaaagctacgccctgtggccgcacctgacggtagcgcgcaatatcggctatggcctgaagctgcgcaaatggcgcggggcggatatcgcgcggcgggtggcggagctgctgcgaatagtcaatctcgaagggcttggcgaggtgaaagtgaccgaactgtcgggcggccagcggcagcgggtggcgctggcgagagccctggccatagagccccaggtgctggtgttggatgagccgttatctaatctggatgccaaagtgcgcctgaatgtgcgccatgaaattaaatctctgcaaaagagactggggttcacgtcattaattgtcacccacgatcagcaggaagccttagtgatggcggaccgcattgcggtattaaatcaggggcgtattgaacaaaccggcacgccggaagaaatatatcaacgccccgcgacgcccttcgtcgctgattttatgggggccgataataaaataatttccggtgaattatccgctgccgcaatatccggtttatctgccgctcagcagggtgacaacgttatttattttcgcagcgccgatgccgcgctcgctgaattaacgcagcctgcgccgcaggaggggctggctctggaaggcgtggtggagcaaagcgcgtttctgggcaatctgtatcgtcacagcgtgcgctgccatgaccgcctgctgctggcggatgccgcgcagtgctggccgacaaaaagccgcgttcggctccatgtgccaacgccggccctgcatatttttcctttaccactatcacagtgatatcagcgtgttcattctggggacaatccatgttgactaagacgaaagcagcgatcgtaacgaccctcttcctgagccttggcgcacaggccgacaccattctcaacgtcgccaccgcgggcgatcagaatatggtggattatgtaaaaacctggctggggccaaaatttgaagccgctcatcccggcgtcaaggtgcgggtgatcggtaccggccccggcgacgccgggtcgaataaaattagcgagaagctaacggcccagcaggagagcggcgcgcagcagtgggatatcgacgtcgcggtagtgcaccagaaggcgggcggtgagcaggtggcaaagggattgctgcaaaaataccgtcaggatattcagaccggcggcatggttagttcgccgagcgccacccaggcgctgggcgttaacgttgacggatacgtgatgccgatgttcttaagccagaccgctatcgcctggaacagcgatctggtcactaccccgccggcgtcgtatgacgagctggtggcctggacgcagaaacacccgcaggcttttggctataacggcatcaagaacggcatgtccggcgtcagctttgtggtgggctggatctacgcctacgggaccgacgcccagcgtctctccgccgggccttatgataaaagcgtcgaaaaaggctggcagcaggcctatgagaagctaaaggcgttcaataaaaacgtaactttcaccccgggcaacgccgggacgctcgatatgctgagccggggggaaatcgccatgggcccggtgtgggtcgatatgttctatagctggaaagatcagggcaagctgccgccgtcgatcaagcttgctttactggcgccgggcatgccgggccagccgatgtattacgtcatcccggcgaaggcggcgaatccgcagctggcgcgcgactttatcgcgctggccaccagcccggaagtgcaggcgcaggggatcgtcaagcagttcaactggtatccgggcatcgacgccgggcaggtgaagccgaagctggatgcggcgacctggcaaaagctgtttgccgaaatctcgccggaagcgctggcgaagtatggcaaaagcttcccgatcgccccctactttgacgatatcaaagagggttacgaaagccaggtggctaattaaacctttttccagcccgggccgccgtcccgggcgcttgcttgtgctgacgccaggtttattatgtccagttcattaaaatatctgctgctggttgccccagcggcgctgatgatcgcgatcctgtttttgtatccgctggggttttcgctggtctcggcgtttaccgcgccgggacagccgttcaccctcgatcacttccgcaaggtctatgcgctctacgccagcgatgtgctcttttcgctgcttattgtgctgatctcggtggcgctgttagcgctgctcgccattaccctgtcggcagtgattgcgctgtcaccctgccgacccgttgtgcgtctgctgggttttttgtatcgcctgccgctgtttattccttttatcgttgttgcccagatgatgcgcacttttctcgccaaaaatggcctgatgaacaatgcgctggtggcggccgacctggtcacgccgctggagacgctctcctggctgggatggaaagggatagtgatcacctttgtctggaagcaactggcctttgccacgctgctgatctgcggggcgatggcggcgctggagtcgtcgcagatccttgctgcacgtaatcttggcgcctcccggccgcggatcctgttcgatatcatgctgccgcaggtcctgccgactatcggcgtggcgctggtgctgtcgacggtgaccatgatgtcggtgctgtcggtaccgttgatgatcggcgtgggaaccccgacgatgctaaccgtggatatggcgtttcgcgtcaattcctatggtgattacgcggtggcgaatgcgcttggcgtggtgtcgctggcgatctgcggcgcgctgtcgtggttttacctgcgccacagcctgcagcaaaagggcggtgaatcatgaaagcgctggccctcgtatcaaccccggcatggtgggtgaaagggcgccgtaaagtgcgcgccagtccggtgctgcagaccctgctgctgctgtttatgctgctggcgatgtttggtccgctgctgaacctgttgatctggaccgtagcggaaagctggtattttccccattcgctgcccagccggtgggggctgaagtactggtatcaggttttcaatccatacagcgatgtctccagctcgctgttaaccagcgtgctgatcgctctgttatcggtgggggtctgtttgctgatttccgtacccgccggctatgcgctttcccggcggaaaatgccattacggatgctgttcatgctgctatttcttatcccgcaggcctttcctaacctgacggtatacatgaatgttgcccgattgttttatcagtggggattgaacggcagtatcgcaggggtggtgctggtgcatagcgtccacggtctgatgtactcggtgtggatctgtgtggccgcgttttcagccatcgacccgctgctggcgcgggcatcgcgtaacctgggcgccgggccggtgtataccttctggcacatcgtgctgccgcaggcggcgccggggatcgttgccgccagcatctttgtttttctggagtcgctggatgagtttaccggcactttcttcgtcggggcgccggatatcaccacgctgccgctgctgctctataacgccagcatgtcgggtaactatcaggtctcgtcgattaccgcgctgattttgctggccccgtcgctgctctttatggtggtgatccataaatttatgcgtccggagatgatggcgaaattagggaaataagggctgcagaaaacgaaaaagcttcccgtcgggaagctttttaacctcaggtcatcatcattggccattctggcggtgtctgactcatgacttcaatcatcacatctttgatattgccccagattttggccatatcaagcagggtgataccgagcaaaccggtggcgaaccagcaggcggcggccaggccgaggcagctgcagatcaccgccagaccggcgtaatcgcttttgcgaagctgaatattcagtgagctggcgagaaacatcagtaccgcgctcaccaggggccagcgcaataatacgacactggtagtaatggaagccattaacctatcctcaaagaaagtcgggagccatggacgacctggcgcgactgacgatggcatagcgctctggtctcaactggcgtactagagagtgatgaaacgccatttctgtttcatcaacttgtgtgaactatatcacacttggcgctttattcaccagtcaaaaaatgagcttttgctgcgtttaataactatgaagtttgtgtggatattggtgagcaaccccgggaagcatattttcattcactgcctaatgattattattctgcgggttttattacctgttcttgtttattacacggagaaaccgagtcagatgcgcgtctattcttaatcttgccggaatatcttccgaatacctgataaataagtattattcatcaccatcagaggtaaaactgacgctcgtgagggctgtcggatgtcagctgatgtctatcgcaatcgcgattgctaacgtgttcgggctaccttaattaaggcatatcgcatggatgtaagcgtaaatgggtgacagtgcgccgcataaggcgctaagactcatcggaacaggtttggttattttattgccagtggtgctggcattgtggtttgcccagctgcgggctaaagccgaaaccattgatcaattacactcattttcgcagctggcgctgcaaaaaacggaaatggtcatccgggaagcggatcaggctcgggctaaagccagccagtatcgcggtgagttgtgttcagcggatcaccagcgttatttactgcatattgtgcgcggcctgctgtatgtggaagatctgatctacgctaacggccagcgctttatctgttcaacgtccgttcatcagcaaaccggctggcggatgccggcggctaattacaccaaaaagccggatgtcgcgatttactattaccgggacacgccgttttatccgggctttgccatgaattatatgcagaaggggccctatgttgtggtggttaatcccttctcgtacagctcggtgatcgccagcgaccgcgatttagcctatggcgttttcgataccaaaaccaacctctttttctcggtaagtaacaatgtcgagcccgcggaactccatgcgttaattcgcgaaggcgataccttttttaatcagaatggccgggtgtatacgatcgcccgctccgctattcgccccatcgccgtcattatgtccacctcgcgggccagctactatcacaacttttgtgaccaggccagtctgacgctgccgctggggataatttgcagtattttactggtgctggtgtggtcgcgcacccgccgacagtatcactcgccgcgcaatatgctgcagcgggctctgagctgccgccagctgcgcctgcactaccagccgattatcgatattaaaaataaccgctgcgttggggcggaagcgctgctgcgctggcctgggtttgacggtccggtgatgaacccggcggagtttattccgctggcggaaaatgaaggcatgattgcccaggtcacggactacgtggtggatgaactgttttatgaaatgggtgagtttctggccagccatccacagttgtatatagccatcaatctctctgcgtcggatttccattcggcgcggctgatttcacagatcagtgagaaagcgcacagctacgcggtctgtatcggacaaatcaaaatcgaagtgaccgagcgcgggtttatcgacgtaccgaagaccacgccggtgatccaggcgttccgcgaagcaggctatgaaattgccatcgacgatttcggcaccggctactcgaatctgcataatctgcacgcgctgaacgtcgatatccttaaaatcgataaaaccttcgtcgatacgctcaccaccaacaacaccagccacctgattgctgagcatatcatcgagatggcgcgcgggttgcggttaaagacgattgcagaaggcgtggagacgccggagcaggtaagctggctctacaagcgcggcgtacagtattgccagggctggctgtttgcgaaagcgatgccggcgcgggagtttatgcagtggttagccaatgctcccgcgcccgcgaacgtgcctcagccgccgcgtcacgcggagatctgatggcgatagtcgctgggagtgcggtcaaactcgcggcggaacacccgggagaaggtttgctgcgagacgtagcccagatccatggcgatatcaaagatcggccgctgggtggttcgcaacgcctccgccgccagcagcaggcggcgctggcgaatatagtcccccagcgtctgatgcatcacggtacggaacatccgctgcaggtaccacttcgagtatcctgactttctggcgactatatcaatgttaagtggttgatcgatatgttcatcaatccattcaatcaaagtttgaataatatcctgatgggacataaagcggcctctctcaattctcgattcgtcgttttgtctgcaggcgagtataattcctcaagttaacttgaggtaaagcgctttatggaaaagaaatcaccccgcatcaaaatgctgttgacgcctggagaagtggcaaaacgaaccggcgtggcggtctcggccctccatttttatgagagtaaaggattgatccacagtcagcggaatgccggcaatcagcggcgctaccggcgtgacgttctgcgcgcggtggcgattatcaaaattgcgcaacgtattggcatcccgctggccactatcggcgacgcgtttggcgtgctgccggaagggcacaatctcagcgcaaaagagtggaagatgctgtcatcgcagtggcgtgaggagctggatcggcgcattcataccctgacggcgctacgcgaccagctcgacggctgtatcggctgcggctgtttatcgcgacgcgactgcccgctgcgcaacccgggcgataaactgggggaagagggaaccggcgcccggctgctggaagacgagtgataaaactaaagcgccacaactgggcgctttagttgttttccggtcttggtctttcgcattatctcgctggttcgcgagagggtttcccccgacgtcgacgtccctcagtattgcgcaatctgttgatggaggttccggtttgcgtcgacactttaactatggcatctgccgtcgctttttcctcactattttgctgaaattttcccggcaatgagcgcctgttcctatagttaatttgaacaaactacgggagaggctcatgctgacggtacatcatcttaatcaatcacgatcgcaacgcgtactgtgggcactggaagagctgcagctgccttatcagatagtccgctatcagcgggagaaaacgatgctggcgccggcggcgctgaaaaaaatccatccgttgggcaaatcaccggtactggaagataacggctatgtgctggcggagtccggggcgatcctcgagtatttgcaggaaacctgggacagcggcgggttgttgaagccgcagggaattgacgacaaactgcagtaccgcttctggctgcactatgccgaaggctcgctgatgccgctgctgttaatgaagctggtgttcgccagccttggcaaaccccctgtgccctttggcgttcgctcgctgggttcgctgctgggcaaggggatacagaaaacgtggctcgatccgcagctggccacccatgcgcggttcattgacgaccatcttgccgcgcggccatggttcgctggcgagcggctgagcatggccgatatccagatgagcttcccggtgatggcattgttggcgcgcggcggcatgcatgaccttgtccatatcgaggcctggcgtcagcgagtggaacagcgaccggcctggcaacgcgccatcgagcgcggcggccccttcaccttacccggcgcctgagatatcagcggatccgatgacgtcgataaatgaaagcaactcactaaaaaattgttagcggattgcgcatagacgataacgtttgcgcatcggctggtcattttctgttcgtcataagcgaaatttagcgaaatacgataaacatcggttgaaaagggttatctaaaggccggataatcgtttgcctttctgtttcgctcccccttttttctgctgtccgggggaggcgataaggttgaccaccgtagtgtatgcgcggagttaaacgtttgcttttttgcggcccccctggcgctgcgattcggtacatggagatcgcgtttaactggcagtggacggtccaccacgcatatcaacgaacgataaaaattttcaggggaagttttctatgtctacgccttcagcgcgtaccggcggttcattggacgcctggtttaaaatttcggcgcgcggcagcaccgtgcgtcaggagattgttgcaggtcttactacctttctggcgatggtgtactccgtcatcgtggtgccgggcatgctcggtaaagcgggcttcccgccggccgcggtgtttgtctcgacctgtctggtagcgggcgttggctcgctggcgatgggattatgggcgaatctgccgatggcgatcggttgcgctatctcgttgaccgccttcaccgccttcagcctggtgctggggcagcagatcagtattccggtagccctcggcgcagtattcctgatgggggtcctgtttacggtgatctcggcaaccggcatccgcagctggatcttgcgtaacctgccgcagggcgtggcgcacggtaccgggatcggcattggcctgttcctgctgctgatcgccgccaacggcgttggtctggtgatcaaaaacccgctggacggtttgccggtggcgttgggcaactttgacagtttcccggtggtgatgtcgctgattggcctcgcggtgatcattggtctggaaaaaatgaaggtgccgggcggcattctgctgaccattatcggcgtgtcgattgtcggcctgattttcgatcccaacgtccatttctccggcattttcgctatgccatccctgagcgatggccagggtaattccctgatcggcagcctggatatcgtcggcgcgctcaacccggtcgtgctgccaagcgtgctggcgctggtgatgacggcggtctttgacgccaccggtaccatccgcgcggtggctggccaggcgaacctgctggataaggacggacagatcatcaacggcggtaaagcgctgaccaccgactccctgagcagcgtcttctccggtttagtcggggcggcgccggcggcggtttatatcgaatcggcggcgggtaccgcggccggtggtaaaaccggtctgaccgcggtgacggtcggtgtcctgttcctgctgatcctgttcctctccccgctctcttatctggtgccggcctacgcgaccgcgccggcgctgatgtacgttggcctgctgatgctgagcaacgtggcgaaaatcgatttcaatgactttgttgacgcgatggctggcctgatcaccgcggtgtttatcgtgctgacctgtaacatcgtgacgggcatcatgatcggtttcgcgaccctggttattggccgtctggtctccggcgagtggcgcaaactgaacctcggcacggtgattatcgctgtggcgctggtggtgttctacgccggcggctgggcgatttaaacccttcgtgctcctcacgggcggctcaggccgcccgttttatttttaagccacatcctgtttccatttgcgttaatctgggtagcgtatgattcacaggcacgacgccttacaggtataaaagaaaacgcagcaaacagggaacacatggaaatattctttaccatcctcatcatgacccttgtggtctcactctccggggtagtgacgcgcgtactgccctttcaggttccacttccactgatgcaaatcgccattggcgcgcttctggcgtggccgacctttggtttgcacgttgaatttgatccagagctgtttctggtactgtttatcccgccgctgctattcgccgacggctggaaaacgccaacccgcgaatttattgaacacgggcgcgagatcctcggcctggcgctagcgctggtggtcgtgacggtggtcggcatcggctttctgatctactggattgtaccgggcattccgctgatcccggcgttcgcgctggcggccgtgctgtcgccgaccgacgccgtggcgctttcgggcatcgttggggaagggcggataccgaagaaaatcatgggcattctgcagggggaggcgctaatgaacgacgcctccggcctggtctcgctcaagtttgccgtcgcggtggcgatgggcaccatggtctttaccgttggcggcgccaccgtagaatttctgaaggtggcgattggcggcgtgctggccgggtttgtggtgagctggtcgtatggccgctcgatgcgcttcctcagccgctggggcggggatgaacccgccacgcagattgtcctgctgttcctgctgccgtttgcctcctatctgattgccgaacatatcggtgtctccggcatcctggcggcggtagcggcggggatgaccatcacccgttccggcgtgatgcgcaccgcgcccttggccatgcgcctgcgcgccaacagcacctgggcaatgttggagtttgtcttcaacggcatggtcttcctgttgttgggcctgcagctgccggatatcctctccagttcgctggtggcggcggaggccgaccccaacgttgagacctggatgctgtttaccgacattatcctgatctatgccgcgctgatgctggtgcgttttggctggctgtggtcgatgcgtaagctcagtcagcgcttcctgaagaagaagccgatggagtttggctcctggaccacgcgcgagctgctgatctcctccgttgccggggtgcgcggggcgattaccctcgccggtgtgctctccattcctctgctgctgccggacgggaatgtctttccggcgcgctatgagctgattttcctcgccgccggggtgatcctgttctcgctgttcgtcggggtgattgcgctgccgatcctgctacgtcacattgaatcgagcgataatgtgcagcagcggaaagaggagcgtctggcgcgcgcggcaacggctgacgtggcgattgtggcgatccagaagatggaagagcgtctggcggcggataccaaagagaatatcgatacccagctgctgaccgaagtcagttcgcgggtgatcggtaacctgcgccggcgcgccgatgggcgtaacgacgtggaaacctctatgctcgaagagagtctggaacgccgcttccgcctggcggcgctgcgctctgagcgcggcgagctgtatcatctgcgcgccacccggcagatcagtaacgagacgctgcagaagctgctccacgatctcgacctgctggaagcgctgttaatcgaagatcaataacctgtaatccggatagcgcgacgcttattcggactactggcgagactgcagtaaatgtgtagccccggtaagcgttagcgcgaccgggggaaacccgggcagcggcgcaagcgcctgacccgggctaccccttcccttgcggaacgcgttgtcaccagagaattattccagccagaacgctttgctgcacgtcagccaggcttcagcgctgcgcgacatatatacgccttcccgccaaatcatccccagctcccagcgcagctcgctttgcaacgggatccagcaaaaattctgccggtcgagacgctggcaaatcggttccggcaggatcgctacgccaatgcccgcctgcaccatggcggcgagaaaatcccactggccgctgcgcactgcgatacgtggcttcacgtcatgctcggcaaacagccgcatcagctgctggctaagggcaaattcctcgttgtagataaccagcggatgcgacgccagctcggccggcgagagcgaggttttaccttcccactccgcggttcttggcgtcaggacgcacagcgggtgattgaacaacggcaggatggtgaggctgctatcctcctcgacaggcagggcggtcatcgccatatcaagttcgccattgctgaccgcctgctggaccgtcaggccgccaaactcggcgatcttcagctcgacgcccggatagcgctggcggaagcgactgatcggctcggccatcagcatcccgaccatcggcggaatgccaagccgcagcacccctttatgcaggtggttgatatcgctcagctctgactccagctggctgaactcgcccaagatcgcctggccgcgttcaaagacgacgcgcccggtatcggtgagcagtagtttgcggccgtcgcggatcaacagcgtgcagtttagctcatcttcgagattcttgagcatcttgctgatggtgggctgtgtgacaaacagcttttccgccgcgcgagtaaaactctgctgacgaaccacttcaacgaaatagcgcagcgttcggatatccataattattccctgagactatacctgcgatgattttaattcatttctgtccgcttcggcggctctctatactgctcgcctgacttctttttttcaggactatcgcacatggccttcgcgccagctcgcgttgcccccgccgtggcgcaacgacttcagatcccggtacaggtacttctctacgtcgggttattcatcttcgcacaatatctggtgaacaggtggcaggtaccgctgccggctaacctggtcggcatggtgatgctcctgctgctgatcgtctgccgggtgataccggtaagctgggtgcgcgccggcgcccgctggctgctggcggagatgctgctgtttttcgtcccggcggtggtcgcggtggtgaactacgcccagctgttgatggtcgatggttggcggatttttctggtgattgccttaagcacgctgatggtgctcggcgccaccgcctgggtcgttgacaaggtctatcgttacgaagtgggcaggttaaaaaaatgagcgatgccgtgctgagtatcctgtgcctggtggcgacgctggtcctctattacgccaacaaaaaactgtatcgccgttttcataaactccctctgatgccgctggtgttcacgccgatcctgctggtgctgattctggtggtaggccacatctcttatcagagctatatgggagagacccactggctgctgtggctgctgggcccggcgaccatcgcctttgccgttccggtgtatgaaaatgtcgcggtgattaaacgccactggatgtcgctcagcgccggggtggtgacggcggtagtggtggctgtcaccagttccgtatggctggcgcgcgggtttatgttgtctgatgaaattcagcgtagcctggcggtgcgctcggtgaccacgccctttgcgctggcggcggcgaaaccgctcggcggtcaacccgatctggtggcgctgtttgtggtgatcaccggcgtgtttggcatggcggtgggagatatgctgtttttacgtcttgctatccgggaagggatggcgaaaggagccgggttcggcgcggcttcccatggtgcgggaacggcgcgctcgtatgagctgggccagcaggagggcgtggtggccagcctggtgatgatgctgtcaggcgtagtggtggtgctggctgcgccggtcgtgcgctggctgctgttttaacattatcgccagagtgaatgttaataaatattgaggagaggaatagctatcggctattccctgtttttgttattgatgcatttaacggttcatcataaaagattaagccaattcttatatcagcactgactttgtaactaaatgtttctctgcatgcccgtatttaattatggggcaaatattatataaatatccaattatctttgcgaattttataactttataactctttgatttttatggttttgagtatggacacgcatgcgttgcgatgctatgtcgcaaaaaatcaatttttacattaataattgagttcttacctcatgctagttattatttttacgcgagcttgtattattgaatggattcaaatgctggtcgtttatttatgaataatattaattgtcataaaccatatgtcatgtaaatacatgcatgacgccgcgctgcttgaatttcattctctaatatcgctgcataaagcaattgacggactgattgtcgtttataatggatatgggaataaatatgaagatgagtaaaaaatttctggcgggtgccctgattttctctgcctgcagcgcgctgtctaccgttgcgcaggctgataacaccattacctttaatggtattgtttccgataccacctgtacggcgaccattgatggcggtgtaacggctattgatatgggcaccacctcagtggcggatctgaaagcgtataccttcggcgctgccaagaacttctcctttagcttagctgattgcccgaccgcggaagaaggtggcaacagtatcgcccgcgtcacttttggcggtgtttccgataccgcgaacagcgattattttaaaaaccaggcaactgatgagccggcaaccggcgtcgctgtggcccttttcgacgaagcgggcaatgtgatgaagaataacgaagagggttctgatgttgatatctcttcgggtgcagcaaccattccgttcaccgttaaaatggtgaaatcgggtgatgccgatccgacgaaaggtaccgttcagacaaccgtgacttataacgtgacctatcattaattcggcttcttgttgaatggagaaaggggaatcgcctgctattccccttaaattaaacatatgagatatcctttttttgcgatcggtttattgctgtcttcttccttcgcgcaggccagcgtggtcgttggcggtacgcgtctggtttttgatggtacgaaaaataacgctgtaataacggttgagaataaagatcagaacagcaatatcgttcagtcctggctctcggtggttgatgcagcctcacccgccaaagacgcatttattattacgccgccgctgtttcgtctcaaagccggggagaaaggatttgtccgcgtagttcgatcaggaaagaaattacccgacgatcgcgagtcgatgttttggctcaatattaaagggatcccggcaacagaatatgtacctgataaaaatgtcgtacagtttgcgattaattcgaaaataaaattgatttatcgacccgctgcgttaaaaggtaatacaccggaagcgtacgctgaaaaattacagtgggggaaagaggggacgtcggtgacggtaaaaaataactcaccgctgtatatgaatttctcacaggttagccttaacggtaaaaatatttctggcgcatggtttgctgccccgttttccaccttaaaaatacccgtgcagagtagcctgtcggcgacaggaaaaaaagagatcacatggagcgtgattaatgattatggtatgtcagggaagaaatataccgctatcattcagtagcgttgagctgctattttcaactaaaagtatctgcgtcgctattattctgtgcctaagtactctaccctctcgcgcggaggccggcgaatatttcaacccaaatttactcgaagtcgctgagagtcctgcggcttcggttgatctatcctatttttcgcaagatggcataccgccgggcacctatcacctggatgtttacatcaacgataagtacgtcagttcagactcgctgacttttcaggaaattagccatgacgcaggcgcgactgcttctccctgcctgtccgcggagtatctgaattcatggttgattaataccaccgcctatccgcagttgttcgaggcaggggaaacctgcgcccggctgtcggcgatccccgggatgacgttctcggtatctcttgcccagcagcgcattgattttaccgtgccgcaggccgccatgctgaatcgccccagagactatattcccgagagccagtggcaacaggggatcaatgccggtcttctcaactatagcgtcaccgggcagcgtaatgcgccgcggcataacggcgccactatcgacagtcagttcgtcagcctgcagccagggctgaatctgggaccatggcgcctgcgcaactacagcacctatagccacagcgataacaacagccgctgggagtcggtttactcctatcttgcccgcgatattcacaccctacgcagccagctggtggtcggtaatacgtatacctcttccggcattttcgacagtttgagttttaccggtctgcagctcagttcggacaaagagatgctgccggatagcctgcatggctttgcgccgacgattcgagggatcgcgcgcaccaccgcggaggtctcggtttatcagaatggttacagcatttataaaaccaccgtcgctcccggcgcctttgaaattaacgatctgtacgccaccggcagcgccggcgacctgtacgtcaacattaaagagtctgacggcagcgagcaaaactttgtggtgcctttcgcgtcgctggcgatcctgcaacgtgagggccagctggactatgcgctgagcagcggcaggacgcgatcgggtagctccgacgataaagaatataactttattcagtcttccctggcctatggcgccaccagcaacatcactttttatactggtttccagcaggcggaagataaatacaccaacctgttgttaggcgctggctttaacctcggtactatcggtgcgctgtcgtttgatggctctcagtcgtgggccgacgtgaaaaccagcgatacggccttgtcaaccagtaaagagcaagggcaatcgtatcgcgtccgcttcagtaaaagctttctgcagacgggcaccagcttttccgtggccggttatcgctactccacctcgggatattattcgtttcaggactttgtcgataactcttccacacagcgcgactgctgtacgcagagcggcagaacgaaaggccggtttgacgcatcgttgtcgcagacgctgtttggctatggttcgctctcgctttcgttggtcaatgagacctactgggacagttcgcgtatggaatcggtgggcgtgggctatagcgggtcgattggcaaggcctcctactttattaactattcctataaccgcaatgtgcaaagcaccgatgacagcagcaataaccggccggccagcgatacggtcgtctccctgacgttaagtattccgcttggcgagacgctctcggcaaattacaccatgaaccatggtcggcataacgataccacgcacagcgtggggctcaacggctcggcgtttgaggatcgttccctgaactggagcgtactggaagggtacaacacgcaggataaaagcacctccggcaacctcagcgtcaactaccagggctcgaaaggggatgtggctggcggctatggctacgaccgctacagcaatcactacaactattcgctgcgcgggggcatggtcgcccatacgggcggactcacgctatcacgctttcttggcgagagttctgcgctggtcgaaacgcctggcgtcagcgatgtgacagtgcgcggtcagacaaacgtgacgacggatgccgccggatatgcggtggtgccttacgtccgtccgtaccatcgtaacagcctggcgctggatgaacaggaaatacctggcgctgaagtggataacgtcgccagaacggtggttccgacgcgcaatgcgatcgtcaaagtgaagtacgacacgcgaattggctataaggcgatgctcaccctgcgtacccgcaatggcgtggtgcctttcggcgcgctggtgaccctcgataatgatcacggtagcgcgtcgcgcagcaatatcgttggcgatgaggggcaggtgtatctaacggggctgcagaaaaaaggccagctgttagcgcgctggggggagaaaagcagtgagcagtgcaccgttcattatgacttctccggcatggcccttggcgacgatattctgttctatcaggccgaatgtcggtaatggatgcaggttttcaacatggaagaggggctgatatgaatatgcgagacggcagcacaaggggcctcctggtggccattttgctgctctcccttccggcgctggcttatgagggcagcagcacggtcaattttaacgtcacgggcaccatcgaagcgccttcctgtgaggtggccgtggagccgtcgaacagtatcgatttaggcaccgtctcctcgcagacgttctccggacatgccggggcgagcggcgccagcgtgccggttaagctggtcttttccagctgttccgccgatgcgtcggcggtgaccatcgcgtttagcggcaccagcttcgatagcacccacgcttcaatctataaaaacttccagactggcagcaacggtgccagcggcgtcggtttgcagctgcagagcatggccgaccagcagccccttggccccggcgaccagtatctctatacctttggggacgatgcggatatccatacctttaatatggtggcacgtatgttttcgccttatggccaggtaaggtccgggatggtcgggtttaccgccacgttcgatgtggcttacaaataacgtttcgacagggatgggtatgaaaaaactgatcttattgctcatattggcactgtgtcccgtctatagctgggcggcctgcacgggaaccaactatggcgatgtctcgatgaccaacctgccggaaaagatcctggtcaatgccgggagctataccgcagggacggtactgtatgactcggggaagattacgcgctcgcaaacggaattgcttaactgtgaggggagcacctacgcggtttttgcctggtcctcgaacaatgccggggcactgataggggataatatctatgccacctcggtgcaggggatcggtatccgcgtcaaggtgtggctcaatatcagcggtgaatatggcgatgacaccgatgatttcagccccgactcgcaggtgcattatattggtgatgtgaattattacctcggaaagccgacaggtcttttcgactctttcgcgtcgactcattataccccggcgtatcagctgcagctggtggccaccggcggcgccatcgccagcaagagtcaattatcgttcagcgacccggtggccacggtatcggccaaggataaaaaggggaccatcgctatttcacaactgcacatcagcggcaccaccagcatccagctaatcccgatggggtgtattgtcggtagcaataatctcagtttttccatgggcagcatcaatgccagtgagtttaataccgcgacgaaggtgggtagcgcgcggcagtctctgagcctctcctgcgagccgggaactaacgtttcgatgcgtgtggtggctgcttctgcaagcggggataaccctgacaatacggtgatggccctcgcggcggaacagaatgccgccactggcgtgggagtgcagttaaatttgaatggcaaagcactgccgttaaataccgatatcagcctctatacttcgagccgcgcgacggtgaccaacagcggcgcggatgccagctacagctatttcaccaaccccgacagccccggaggcgcagcggccatgcagacgctcgccttatccactaactattacaggacggggagcgcggtgaccgcggggacagccaacgccaccggggtgatcacctttacttataactgagggggagaatcccttccccgaacgatgccggggaagggagaggacaattaatgcgcctggccgcgttcgataccgatcccggtttgtgaacggataaactgggcgcggaactgctcgcgctcgcgcatcccttccggtgagttatcggtggcggagaagacccagatgccaatgaacgcgatggcaatggagaacagcgccggatattcatacgggaacagcgctttctcatggccgaggatctgcacccaaatggtggggccgaggatcatcagaatgaccgcagtcagcaggcccagccagcctccgaccatcgcgccgcgggtggtcagcttcgaccagtacatcgacagcagtataatcgggaagttacagctggcggcgatggagaaggccaggccgaccatgaaagcaatattctgattttcaaacagaatacccagcagaatggccaccaccccaaggatcagcacggtgatcttggagaccttcagctcctgacgctcggtcgcgcccttgcggaagacgttggcgtacaggtcgtgcgacaccgctgacgcgccggcgagggtcaggcccgccaccaccgccaggatagtggcgaaggctaccgcagagataaagccgaggaacaggttgccgccaaccgcatccgccaggtgcaccgccgccatgttattgccgccgataagctgtccggccgcgtctttaaacgccgggttcgcgccgaccagcatgatggcgccgaagccgatgataaaggtcaggatatagaaatagcccataaaaccggtggcgtagaagacgcttttacgcgcttctttggcgtcgctcacggtaaagaagcgcatcagaatatgcggcaggccagcggtaccgaacatcagacccagacccagagagagcgcggatatcggatctttcaccagtccgccgggactcataatcgccgcccctttcgggtggaccgccatcgcctcggtaaacaggttattgaagctgaagccgacgtgcttcatgaccataaaggccataaagctggcgccgcacagcagcagaaccgctttaataatctgcacccaggtagtcgccagcatgccgccgaacaggacatagagcaccatcagcacgccaaccagcactacggcgacatggtaattaaggccgaacagcagctggattagcttgccggcgcccaccatctgggcaatcagatacagggccaccaccaccagcgaaccgcaggcggagagggtgcggatcggcccctgcttcaggcggtaagaggcgacatcggcaaaagtatagcggccaagattgcgcagacgttcagcaattagaaacaggataatcggccagccgacgagaaagcccagcgagtagatcagcccatcgtagccggaggtatacaccagcgcggagataccgaggaacgacgccgctgacataaagtcgccggcaatcgccagcccgttctggaagccggtaatattgccgccggcggtgtagtaatcgctgcgcgaacgcacccgttttgaggcccagtaggtgatgtacagcgttagggcgacgaaaatcaggaacatgacaatcgcctgccagttggtcggctggcgctgtaccgcgccggtaatagcgtctgcggcgtgagcgccgaggggcagcagcgtggcggcgagcgccgtcaggactctcttgatcatgcttttacctcgttgagaacgcttttggtcaaacggtcgaattcaccgttagctcgccagacataaataccggtcaggataaacgaaatgacgatcacgccaatgccgagcgggatcccgcgggtgacgctggttccggcgtgcagcggggtgccgagccagccgggtgcaaaggcgataagcaaaataaagcccacatagatcactaacataatcactgacagaatggcggcaaaccgttgccgtgatgcaactaactccctgaaatgcgcactattttctatccgctgacaaagttgttcattcatcttagcgtctccagaggtctccctttcgtcatccactcggcggacgctggcgacagcaacccctccggcgacggagccgggacaggtgttgctgacggcgttcctgcgagtgaaatcctgggggagggacttatttttatcctctccccggaaggggagagggtgtagggaatcggtccttacttacgatggcatggtaatggcctgcttctcttcgagcagtttttccacgacgccaggatcggcgagggtcgaggtatcgccgaggttgctggtgtcgcctgcggcaatcttacgcagaatgcggcgcatgattttgcccgagcgggttttcggcagcgaatcggtccagtgcagcacatccggcgtcgccagcggaccgatctctttgcgtacccagttacgcacttcggcatacagctccggcgtcggttcttcgccgtgattgagcgtcacgtaggcatagatggcctggcctttgatgttatgcgggatccccaccaccgccgcttcggcgatttttgggtgtgagaccagcgccgattcgatctcggcggtccccagacggtgtccggagacgttcaggacgtcatccacccggccggtgatccagtaatagccatcttcatcacgacgcgcgccgtcgccgctaaagtacatatttttgaaagtggagaagtaggtttgctcaaagcgctcatggtcgccgaacagggtacgcgcctggccgggccaggagtcggcgatggcgaggttgccctcggtggcgccatccagcggcaggccttcgttatccaccagcaccggctggacgccgaagaacggacgcgtcgcggagccggccttcagctcaatcgcgcccggcagcggagtgatcataaagccgccggtttcggtctgccaccaggtgtccatcaccgggcacttctcgttaccgatcttcttccagtaccactcccaggcttccgggttaatcggttcgccgaccgagccaagaatgcgcagcgaggagcggtctgtgccttcgatagctttgtcgccttccgccatcagggcgcgaatagccgtcggggcggtatagagaatgctgaccttatgcttatcgacgacctggcacatgcgcgccggcgtaggccagttcggcaccccttcgaacatcagggtggtggcgccgcaggccagtgggccgtacagcagatagctatggccggtgacccagcccacgtcggcggtgcaccaataaatatcgcccggatggtagtcgaaaacgtatttaaaggtggtggccgcatagaccagatagccgccggtggtgtgcagcacccctttcggtttaccggtggagccggaggtatagaggatgaacagcggatcttcggcgttcatttcgacgggccggtgttcggcgctggcgttcgcaatcaggtcgctccaccacagatcgcggccttcctgccagtcgatattgccgccggtgcgtttcaggaccaccacgtgctcaatgcttttcacgttcgggtttttcagcgcgtcatcgacgtttttcttcagcgggatggcgcgaccggcacgcagcccttcgtcagcggtgatcaccaggcgtgagctggagtcgataatgcgtccggccaccgcctccggcgagaagccgccgaaaatgaccgagtggattgccccgatgcgggcgcaggccagcatcgccaccgcggcttccggcaccatcggcatatagatagcaaccacgtcgccttttttaatcccgaggtcgagcagcacattggcgaaacggcacacgtcggcatgcagttcacggtaggtgatgtgcttgctttggctggcgtcgtcgccttcccagatgatggcggtttgatcgccgcgttcggcgaggtggcggtcgagacagttagcggcgaggttcagggtgccatcttcataccatttgatggaaatattacccggtgcgaaggaggtgttctttacacgggtatagggccgcatccagtcaaggatcttgccctgctcgccccaaaatgtatcagggtcggttatggattgttggtactgcgccttgtactgatccgggttaatcaggcaacgttccgcaatattagcgggaatagggtgtttgtgaatttggctcatggctttttttctcctttgaacttgttaaatatatgtcaaacaaacgttaagagtaggggttttgacagctttgtttgttaattggggggcagatcacgcaatgattaaactgggtgaaatttcatcaaatgaaactttgaagcgaaataattacgcaaatgaatttatagaaacggaagctgtgaaaatttttttattacaaatacttatgcaatataactgggggaaattcgctgctttatgcataaaagcagaggaaagccctgttcttaaaggcttgcgcagcatgccgtgcaaatgatactgatattgcgcgttaaataaccccacaaagcaacgcaacacaattcataccccctgcagtgggtaccatgacgaaaaggaatggtgcctttcattgaggaagtcagtagtgaagaaaacaaaaaaagtcagtctggcctggcaaattttgctagccctggtgctgggtatccttctgggcagttatctgcattaccacgctgaaagtcgcgattggttaattagcaatttgctgacgccggcgggcgatatctttatccatctgattaaaatgatcgtggtcccgattgtcatttcgaccctggtggtcgggattgccggcgtgggtgacgccaaacagttagggcggatcggtgccaaaaccattatctatttcgaagtgatcaccacggtggcgattgtgctgggtatcaccctggccaacgtcttccagccggggacgggcattgatatgtcgcagctggcggcagttgatatttcgaaatatcagaacaccaccgccgaagtgcagagccatgcgcacggcctgatgggcaccatcctgtcgctggtgccgaccaatatcgtggcatcgatggcgaaaggcgatatgctgccgattatcttcttctcggtgctgtttggcctggggctctcctcgctgccggcgacccaccgtgagccgctggtgacggtcttccgctctatctccgagaccatgtttaaagtcacccatatggtgatgcgctatgcgccggtcggggtattcgccctgatttcggtaaccgtcgccaccttcggtttcgcctcgctgtggccgctggccaagctagtgttgctggtttactttgcgatcctgttcttcgcgctggtggtgctggggattgtcgcgcgcctgtgtggtctgagcatctggatcctgatccgcatcctgaaagatgagctgattctggcttattctaccgccagctcggagagcgtactgccgcgcattattgagaagatggaagcctacggcgcgccggcgtcgatcaccagctttgtggtgccgaccggttactccttcaacctcgatggttcaacgctgtatcagagcatcgcggcgatctttatcgcccagctgtacggtattgacctctctatctggcaggagattaccctggtgctgaccctgatggtgacctcgaaagggatcgccggcgtgccgggcgtctccttcgtggtgctgctggccaccctgggtagcgtcgggatcccgctggaagggcttgcctttattgccggcgtcgaccgtatcctcgacatggcgcgtaccgcgctaaacgtggtgggtaatgcgctggcggtgctggttatcgccaagtgggagcataagttcgatcgcaaaaaagcgctggcctatgaacgcgaagtgctgggtaagtttgataaaaccgcccaataaaacacaaagcccggcgcgatagcgccgggctttttcttatcctttactaatccggtcaaactcttcgcagccggtatcaaacccctccaggcaactgacgttgagccagtgcagcgccttctgcttattcggttcgataaagcctttttctccctgctggaacatcatcccggcccagtattcggcatagccggtgcgggaaagtgatgaactgcctttgaagtattcacttgctttcacatcatcctccgggccgtgtacgccgctggcgtagatcagccccagcagcatctgggcatctaccgccgcatcgctttcgctatcccgggcagcatcctgcagcagcgtgatggcgtgcgctacgtcggtggcgccagcctgacggttgaccagcacccgcgcgaggacgatctctccggatttactgccggcctcgacggctttttccgccagctggcgggcctgcggatagtccgcctgttgggggttacggattttgagctgcgccagcagcgccagcgcatcgccatcgccctgggcggccgccttctgcgcccagtattcggctttttgataatcgccggagctgacccaggtatcggcaaggtaatattgcgcgcgtcgatcgccggcttcggcctgctgttgatactgactgccaggttcggtggccaccgctgcgccgctggtgaaaaccagtagaaataaaaagaggtatttcatttgtatttattatcagtaaggaacatagcgcgcagtataaagggaggcgaaaaagaagaaaatggcgggtatcggtaggtaaggccgatttgcgctacctgaccgtaggcccgcgcaagcgcagcgccgccgggcgacagactgcggacacggagccgcttgtgtgccgggtggcggctgcgcctgacccggcctacgcatcgcgcgagccgggtcagaccgccgaaccttaacccatcgcgctttcgcgcaggcgggatttcagcttgttgtactcgtcgatcacgtactgttccgcggcgcgctgatcggcaatccgctcaacgttgaccgcgcagtacttgtactccggcgttttggttatcggactcaggttctctgagaccagttcgttacaggcgccgatccaccactggtaggtcatgtacaccgcgcctttattcggccgatcgctgacctgcgcgcgggtgatgatgcgccccttacgcgaattgacccataccagctcttcatcttcaatgcctagccgttcggcgtcggcggtgttgatttgcgcatagcctggttcatccgccagcgccgccagcgccgcgcagttaccggtcattgaacggcacgagtaatggccgacctcgcgcaccgtcgacaataccatcgggtactcgtcggtaagcttatcgatcggcgcgacccagtcgcaggtgaagaactgcgccagtccgttcggggtatcgaacttctctttaaacagatacgacgttccctgatcggcgtcggactcatcgcggcacggccacatgacatagccgagctcacccattttctcgtaggtggcgccgtagaagtccgggcacagatgccgcaactcgtcccagatctcctgggtgttattgtaatgcatcggatagcccatccgggtggcgatttcgctgatgatctgccagtcggttttcaggtcccacttcggctccaccgctttaaagaagcgctggaagccgcggtccgctgcggtatacacgccttcgtgctcgccccacgaggtggacggcaggatgacgtcggccgcggaggcggttttggtcatgaaaatgtcttggacgataaccagttccagatcgtcgaacgctttgcggaccgccgagagttcggcgtcggtctgcagcggatcctcacccataatgtacgccgcccgcacttcaccgtgcgccgcgcggtgcggcaattcgctgatgcgatagccggtatgcgcaggcaggctttccacgccccaggctttggcgaatttctcgcggttctccgggaacttgacgtactgatagcccggataggtatccggtagcgcacccatatcgcaggcgccctgaacgttgttctggccgcgtaccgggttgacgccgacgctcggcttgccgaggttgccggtgaggatcgcgaggctggtcagcgaccgcaccgtctccacgccctggtagaactgggtgacgcccatgccccacaggatggcggcggatttggcgctggcatacatccgggcgcaggcgcggatctcctgggcgctgaccccggtgatctcctccaccgactccggcgtatagccttcaacgattttgcgatactcctcgaagccttcggaacggctggcgacgaaggatttatcgtacagatcctcttcaataatcacgtggccaatggcgttgagcagcgcgatgttcgagccgttcttcagcgcaatgtgcatatcggcgatgcgcgcggtttcaattttgcgcgggtcgcagacgataattttcgccccgttgcgtttagcgttaatgacgtgattcgccacgatagggtgggaatccgccgggttgtaaccgaagataaacaccagatcggtgtcatcaatctccgtgatggcattactcatggcgccgttaccgaccgactggtgcagacctgcaaccgaagggccgtgtcagacgcgagcgcagcagtcgacgttattggtaccaataacggcgcgcgcgaatttttgcatcacatagttggtttcattaccggtgccgcgggaggagccggtggtttggatcgcatccgggccatatttggctttaatggcgctgaggcgggtggcgacgtaatccagcgcctcgtcccaggagacggcttccagcttgccgccgcgttgacggcggatcatgggggttttcaggcgcggcgttaggatctgggtatcgttaatgaagtcccagccataatagcccttcaggcacagggttccctggttggttttcccctgcgccgcttcagcccgaacgattttgccgttatcgaccaccaggttgattttgcaacctgatgcgcaatacgggcaaaccgtgacgacttttttcatcggtcttgctccagttattcaatgggcgcgtttgcgctatcgcgccgtcactatgcatcttctatgccatattttcattgtgggtattccttgatgatacgcgggttttttgggcggaatgctgacgaaaaacagcctgtcgacagatttgacgtgtcgataccctggagatgtgacggcgcttgaaaaaatgtcaccgggagaggaatttgtcggcgcaggcttgcagaatcgatcagactgacactaattcccggcgggcagaggcaaaaatgaaaccagtcattttagtggtggatgatgacagggcgatgggcgagctgctcagcgatgtgctcggcgcgcacgcgtttgaagtgcttgtcagccagaccggcaacgacgcgctgacgacggtggcgcagcgggcggatatcgcgctggtcttactggatatgatcctgccggatacccatggcctgcaggtgctccagcagctgcagcgcacgcggcctgagctgccggtggtgatgctctccggtctgggcagtgagtctgatgtggtggtgggtctggagatgggcgccgatgattacatcgccaaaccgttcagctcgcgggtggtggtcgcccgggtgaaagcggtactgcgacgcagcggggcgctggccggcgaggcgtcgggcgccggtgctggcctgacgtttaacggctggcggctggataccacgcgctgtgaactgtataacccgcagcagcaggcgatcccgctgacccagggagaatatggcctgctgctggcgctggcgcagaacgcgcgccgggtattgaatcgcgaacagctgctggcgctgactcataatgaaagcaccgaggtattcgaccggaccatcgatgtgctgatcatgcgcctgcggcgcaaaattgagctcaacccgcatcagccgacgttgattaaaaccctgcgcggtctgggctatgtcttttccgccgacgtgacccacagcgagaaggcggcgtagggcgggtttgctgccaacccgctgttgactttatttggcgcagggagtttactttttttattaaagtgacactctgggttaatctatggcaacaaaattaaactggctgctgcaaaacagcgctcccggagatgtgatccttcagtcctggttaagccagcatgccatctctccctctctggcctttaaatacgcgcaaagtggctggttaaaaaaaagaggcaacggcgtatatgcgcgtgcgggacgtgagccggagtggaacgatgcattagcatgtttgcaaaatcagcttgccgctccggtgtatgttgcggggctcagtagcttagtctggcagggccgttcacactatctacagctaaaacaaaaccagtgctggcttagtgtggaaaataaagcgctgctgccgaaatggttcagggaattcccgggtgtggagtggatagtcatatcggggaaaaaactgccggtgctggatgatagataccgtgtaacgcttgatataaaagggaaaaaactcatcggcagtgcgccagaactggctgcttacgagttgctgagcgcggtgccggggaccctctcatttaaccacgctgcagagcttttccaggggctggttaatcttaatcctcgtaaagtagagtatcttctttccgtcagccagtccgtgcaggccaagcgtttgtatctcttcttcgccagtttttacgagcatggctggctcaaacgaatcgatagccaaaaaatcgatctgggagcgggcaagcggcaaatcgtggaaaatggaaagttcaatgctcaataccaaatcacagtgcctgaacgctttcaaaaggaataaaaaatatggatatacaggcgccttattatcggtaggttgctctgctaatgcaggttttaccctatgttgctgtcgaacgggaatttgcgctgaaaggtggcactgccatcaatctctttatccgcgatttccctcgattatcggtggatatcgacctcgcctgggtgcccctggaaagcagagccatcgctttacctcatatacgggatgcgcttgcacgtattgccgccaatctgcaacaacaggcaggtatgagcgctgtattacaagctaatcgttcagatgagatgcgtgtcattgttactaccgatagcgcgcaaataaagatagaggtttcaccggtcgcccggggaacattatatccaccacaggagcgagaagtggtgggggcggtagaggacgtttttggctatgccagccttccagtggtttcgttgcctgacctctacggtggaaaattatgcgcggcgctggatcgccagcatcccagagatttttatgacgtgaaattacttcttgatgcgcaggagcttgaccgtcccattttcaatgggtttatcgtgtatttactgagccataatcggcctctggctgaagtgctgaatcctcgctggaaagatattgctgaacctttttaccgtgaattcagcgggatgacatttgagacgatagccctggaggaactgacagcagtccccaacaggatgattgctgcgttaaaatcctgtatcacacaacaggatgtcgattttttactgtcatttaaacgaggcgaaccagactggcgtttagcgccggaaatgcgtattcaggatttgcctgccgtgcagtggaaattgcgcaatattcatcagatgccagcgataaaacgcgctgagtcattagataaactggaaaaggtgctggccgagtggcgcagttagttacctggcccgcccttgttgaactcagcgtaaaacaggcgtgatttgaataaaccgtatcccttttctcgccatgacacgccgttctcctgtggcatcgccctgatagcgggatctactcgatctaaccattctgcaattgtataaacgcctgcagctcagggagcgttttggcgccgtcgatcgcattggcggcctgcaggctggcgcgggcgcaagcgtgagccagctgcagactggcggttaacggccagcgttcgtgactgccatacagcagaccggcgcagaaggcgtcccccgcgccgacgctgccgataatctcctccggcggtagccgccatgacggtacccagcgcccggcttcggtacgggagacgccccatgccccctccggacaatggatcactacccgctggcgtacgccggcgtcaagcaatgcgctggcggcgcgggcgatattggcgacgtgcggctcgccgttgggtagacgaatctccagcccgctaaactcgctggcttccagttcattgatggtcaggtagtcaagatgcttcagcgccggcaggaccagcggccggtagcgcgggtcgcccttgcgcgacaccagatcgagggacacctcatagcctcgctcgcgcatctgcgccagcagtcgcgcgctgcgggtgccgtacacttcatcggggcgatcgaggctttcgagcagcagcagatagccgagatggaaaattttcagcggcgcatccagcggctcaaaagccgggagatcaagcaggcggttggcgccgggagagtgaaagaaagtgcgctggccttcggcgtcggtcatcacctgggtcatcgaggtgggggcggagctggtgcgctgtacgagctggcgattgatatggtactgatcgagcatggcggtgatgtagtcgccatcgttatcctcgccaatcaggccgaccgcctgcagcggcagcccggcgtgcattttggccagggtcagcaggacattcagcggcgcgccgccggtggcgcgttcgctatggacaatctccaccagccagccgcgctccggccactgcctgatctggtggacatgatcgaccagcatgttgcctgcggcaataatgcctttccgttccatgatcgctactccgcgccgtcatattcgttaagcgtagcgcacaatcggcggaacgattgtgcgcctggttgcgcttatttcacggtccagcctttgtaagagctgacgttatttttgtcgatcatcgtcaccgggatcagtaccggcgcggtcggcgcaggtttgccctgcaggatgtcgtagccaatctccaccgccttcgccgccatcacctgtgggtcctgcgctggggtggcgacgaacagcgagttcttacgcttcagcgcctcttcgccgtccgggctgccgtcgacgccgacgatgaagaactcgctgcgctgcgcctgtttcgctgccagatcggcaccaatcgccgtcggatcgttgatcgcgaacacgccgtcaatcttcggattggccgccagcagggaggtcatcacctccaggccgccttcccggctgcctttggcgttctggttggcggagaggattttaatgtccgggtgttttttgaactccgtttcgcagccttcgacgcggttttgtacggcggagaccggcggcccgttgatgatcaccacgttgcctttgttgttcaggcggtcgctaatgtatttacaggccagctcgcccgcctgggtgttatcggaggtgatggtggcgtcggccccttcggcggcgacgtcaaccgccaccaccacgatcccggcctctttggcccgcttcaccgccgggccaatgcctttcgaatcggcggcgttgaggatgatcatatcgactttggcggcgataaagttatcgatctgcgccacctgctggcccagatcgtagccgctggagaccagcgtcactttgacgttatcccccgccagcttgcgggcctccagctccgcccctttggtgatctgtacaaagaacgggttggcaaggtcgcccaccgtcacgccaatcgctttcagctctttggccgacgcaaaaggggaggcggccagcagcgcgccagcacacagcgcggtgactatcggttttaaacgcattcgcttttcctcgcaggtaagatgttgttgttatgcactttgatgatgccgggtacggtatttgtcgatcagcaccgcaatgatgatcaccgcccctttgatcaccagttgccagaagtaggagacccccatcagggtcatgccgttattgagggtggcgataattagcgcccccaccagtgtaccggtgatggtgccgataccgccgacgaagctggtgccgccgagaatgaccgcggcgatggcgtccagctcgtagccgacgccgaggttgccgttggcgctgtacagccgcgaagcgctcatcaccccgccaaggccggagagcaggccgctcatgccatagacaaacagcagcaccagccagactttgatgccggtcagccgcgccgcctgcatgttgccgcccaccgcgtagatatgcaccccaagggtggtgcggcgcaggataaaccagcacaccgcgatcaccgccagggcgatgactaccagccagggcactgggccgaggtagtcattgccgatccactcgaagctgatatcggagttgatcaccgtggtgccgtcggccagcagataggcggcgccgcgcagcgccgtgtaggtgccgagggtgacgataaacggcggtagcccggcgaaggcgaccagcgcgccgttgaacaggccgagcagcaggccgagcatcagcgccgccggaatcgacagcaacgcaaacgccgggatcagcgacaccaccatcgcggccactgcggtggtgccaaggatggagccgacggaaaggtcaatgccgccggtgaggatgatgaaggtcattcccgccgccagcacaatgttgatcgaggcctggcgggtgatattcagcagattgctttccgtgaaaaagttgggggcgataaagccgaaaacggcgacgatcaggatgaggatcggcagaatgccgacggtctgcatcaggtcgcccatcaacatttttttcgccgaagcggatttcgcgaccggcgcggaggtctctttcggtatgctcatagttgccctgccttaaggtgagaatcggtcacgccggtggccagcgtcatgatactttcctggctaatatcaccggcctgtagctcgccggcgataacgccctcgcgcatcacatagacccggtcgctcatgcccaccacttcgggcagctcgctggagatcatcagaatggcgacgccctggcgcgccatgtcgttcatgatgcggtaaatttcgcttttcgcgccgacgtcgacgccgcgggtgggttcatcgaggattagaatgcgcgggccaatcgccacccagcgcgaaattaacagcttctgctggttgccgccggacagtccgccggcgcgcacctgggcgtgcggcacgcggatgttaagcaactggatggcgtcatcggagatggtttgcgccttccggcggttgagcatcccccaggtcgcgtcgcgctccagcgtcgccatggtgatgttttcctgggctgccagttcgagaaacaacccctgttctttgcggttttcggtcagaaagccgatcccgaggtcgatggcttcccgcggcgagtggatcaccaccggctcgccgtcgatctcaatcaccccggcggtggctttgcgcaccccgaagatcagctgcgccagttcggaacgcccggcgccgaccagcccggcgaggccgacgatttcgccggcatgcaccaccaggctgctgggcttaatcttgccgccatcggtcagatcctcgacccgcaggcgcggctggccgcggggaatgtcacgttctttattgaacagatcgctgagcgggcggccgaccatcatgcgcaccagctccggcgcgttgagcttgtcgcgcaccaggctgccgacatactgcccatcgcgcaggacgctgacccggtcggagagctcatacacttccgccatgcggtggctgatatagatgatcgccatcccctcatcgcgcaggcgcaggatgagctcgaacaggcgctgggtttcccgcgaggagagggcggcggtgggttcatccatcaccagaatgcggctttgacggtgcagggcgcgggcgatctccacctgctgttgttcggcgatggtcagggtcatcacccggtcgctggctttgaactgggcgccgagacggtcgatcaccgcctgcgcctggctgagcatggctttgcgctgcaccagaccaccgcgcgccagctcgctgccgaggaaaatgttttccgcgacggtcaggttcggcgccagctgcatctcctggtagatcaatgtgatcccggcggccagcgcgtccttggggccgcggatggtttgcggttttccgtcgatcaggatctcgccgctggtggcggtataggcgccggcgaggatcttcatcagcgtgctttttccggcgccgttctcccccatcagggcatggatctcgccgggccagaccgtcaggtcgacgcccttcagcgcgtagaatttgccaaaagctttggcgatatggcgcatttccagtaccggggtggcggtcatcgcggcgctcctgtctgtaagaacaatagctgcagtccaccaccggaaaataaatgcagaatgtcagaatccattcatatttgtcatagtgataaatagttaaccgcgatcacagttacgcggcgtcattttctgcaccgtcacgcttatctgccgaccgatccttcaccggagttgttatgaccgctcgccgacacccgtttttcaccagcgcccgtggccgcctgctctcctttaatctgctgatgggcgtggtcaccctgttggtcagcggcgtggcggtgttcggctttcaccacgccagccagctgcaggagcaggtgcagcgccagactctcaacgacatgcgcggcagtatggatctggcgcgggacacggcgaatgtcgccacggcggcggtgcgcctgtcgcaggtggtgggggctctggagtacaaaagcgaagcggaacggctgctggcgacgcagcaggcgctgaagcactcgctggcccagctggcggcggccccgctggcgcagcaggagcaggcgcgggtggccaatattattcgccgcagcaacgcgctgcagcagagcgtggcggagatgctggagcgcggccagcgccgccatctgcagcgcaatgcgctgctgagttcgctttaccagaatcagagtaacctgcgccatctcgccgatcttaacgatcgcggcggggataaggcgatcgatccgcgccggctggccgagatggaccggctgatcgtggctgcgatccataccgtcacgccgcggtcgatcgtcctgcaactcgaccagctgcgcggcgccctgccgacacgcagcgccgatcccgcgctggcgtttgtcctccctgatgtgacccgcgagctggcgacgctggccccgctgtcggcccagctggaggagagcgacctgacgatcagctggtacatgtatcacatcaaagcgctggtcgcgttgcttaacgaagatatcaatcagtacgtgacccgggtggcggaagcctcagagcagcgggcggcgcagagccatcgggagctgcgctccatcagtatgtttattctgctttccgcgctgctggcgctggcgatcaccggctgcgccgggtggtacatctaccgtaatctcggctcgaacctgaccgccatctcgcgggcgatgtcgcggctggctcagggagagccgaacgtctcggtgccggccctgcagcggcgcgacgagctgggggagctggcgcgggcctttaacgttttcgcccgtaatatggcgtcgctggagcacaccacccggctgctgaaagagaagaccaaccagatggagatcgatcggattaagcgccaggagctggaggaggcgctgctgcatagtcagaagatgaaggccgtcggacagctgaccggaggtctggcgcatgactttaacaacctgctggcggtgattatcggcagccttgagctggtggagccggatgcgcgcgatgcgccgcgcctctccagggcgctgaaggcggcggagcgtggggcgcttctgacccagcggctgctggccttttcgcgcaagcaggcgctgcatccccaggcggtggcgatggcgccgctactggagaacctcagcgagctgatgcgtcattccctgccggcgaccttaagcctggagattgaggcgcagtcgccggcgtggccggcatggatagacgttggccagctggaaaatgccctgatcaatctggtgatgaacgcccgcgacgccatggcggggcgcgacggggtcatcaaaatacgcacctggaatcagcgggtcacccgcagcagcggccagcggcaggatatggtggccctggaggtgatcgatcatggcagcgggatgtcgcaggcggtgaaagcccgggtgtttgaaccgttcttcaccaccaaagccaccggcagcggcagcggcctggggctgtcgatggtgtatggctttgtgcgccagtctggcggccgggtggcgctggagagcgcgccggggcaggggacgacggtgcggctgcagctgccgcgagcgttgaccgaggttgagaaggaggtggcgccagcggtggacgagccgcccccggcgggcgagcggctggcgctggtgctggaagatgaagaggatgtccgccagacgctatgtgaacagctgcatcagctgggctggctgacgctggaaaccgccagcggtgaagaggcgctgcagctgctggaggcctcgccggatattgccctgttgattagcgatctgatgctgcccggcgccctgagcggcgccgatgtgatccataccgcccgacgccgctttccggcgctgccggtgctactgatcagcggccaggatttgcgtccggcgcagaacccggccctgccggaggttgagtggctgcgtaagccgtttacccgcgcccagctggcgcaggcgctgagcgcggcgtacgcgaggatttgagattcctccgctacccgggtttcatgcggatgattaaggtagcggcaggactctgatgagattggccccgatgaaacgttacgcaaccgcactgctcttttgcactctgtcgctgaccagcctggccgctcgcgccgatattatcgatgacgcgatcggcaatattcagcaagccattaacgacgcctataacccgggcagcagtcgctccgatgacgacgacagatacgatgacgatggccggtatgatgacgggcgctatcaggggagccgtcagcagagccgtgacagtcagcgccagtatgacgagcggcaacgccagctggacgagcgccgccgccagctggatgaacgccagcgtcagctcgaccgcgatcgtcgtcagttagaaagcgaccagcgtcggctggatgatagctactgatcgccccccgcaggccagcgtttaatccagcgctatttccatcccgtcatagcccgcttcgaaacctgtcggcagcgggttatccatcatccagacgtcaaactggtggctgatatgggtgaggatcacccgcggacagccaatgacctggttaaggctgcggacggtgtttagatcgttatggttacgcggggtctgcgcgcgcggctcatgactgcagtcgatgatcatcgcctgcgggcggttattgagcaaaaacttcagcgtcttgtccggcagcccggcggtatccgagagccaggccagccggctgtgggccgactccagcagataaccaaaggtcagcttcgagtgattaaggggtaggggcgtcacccgcagcccctgcaggttaaacatcacaaacggcgtgacggtatggctaaagtcaagcagaccggggtgtttgagcagatcgtcgcagccggcgtcatccggcgggccatagaccggaatcgacgcgccgactccccagcgcagcggaaacagcccctgcacatgatccagatggtagtgggtcagcagcacctgttgaaagctgccggcgggatgatgttccatcagatccggtcgtccggcatcgagcagcgtcacggcgctgttgaacgtgaccactccgctacaggggcggcggcggtgattttcctcgcggcgagcgcggcggcaggccgcgcagtcgcagccgaagaccggcaccagctgagcgccgccggtgccggttaagcggagggtcaggctcatcgtgtcaccttttgtttataccagttgatccgcttcgcgcgccgcgtggctgcgcagcaggcggaaaaattcatcgaccgattgtcggagactgccgtcgttattcaatgtcaggcagttgtccggcttatagcgcgcggcgcggtccagacgctgggcgatttccagcgcattttcccggccgcgctgctccagccgctggcgcagcaccggcggcgagacggcgagacagatcggcaccagcacctcgccgtagcgttcccgggccagcgccagatgggcgcgggagccgttggccaccacgtcaaagccggcgtgcagccagaggtcgatctccacgccaatgccatagtaagtattgttggcgtgccagctgagagcaaaaagatgctgctcggcgcgggtaaaaaactcatgttcgctgagggcgatatgattctcgctgcccgcgttaaacgggcgggttatgtaacgatgggccaccagcagctgcgggtgctcgcgctggcgcagcgccgccagcaggctatctttaccggagccggaggggcccaccagccaaatcagttttcctggcattaaaagaccctctttccctggcgccagacatggtcgatctggatatgttcgccgcgacggtgcgccagcaccaggtcggcgcgtttcccctcggcgatgacgccgcgatcgtcaaggcccagcgcctgcgccggatgctgactgaccagacggatcgcctgtggcagggtgaaggcattgtcctcggcgtcggcgatgcggaaagcggcatccagcaggctggcggggtaatagtcagatgagaggatgtccagcaaaccgtggctcgccagctggtgggcggcgacgttgccggagtgggaaccgccgcgcacgatattcggcgcccccatcaggacgtgcatcccgtgctgacgtgaagcctgcgccgcggccagcgtggtgggaaactcggcgatcacgctccctagctggtgagattcggccacatgcgcttcggtggcgtcgtcgtggctggcgagggcgatacggcgggcgcggcacatggcggcgatggtctggcgattgggctgcgaccaggtggcggccagagccatctgctcggcttcaaaacggtccatttcgtcatgcgtcagatgatatttgccctgataataatcgcggtacttgctgcgatcggcgtactgacgctggcccggcgagtggtccatcagagagaccatgctcaccgactcgcgatcgatcagcttttcaaacagcggcagcgtggtgtgatgcggcagctcgcagcgcaggtgcaggcggtgttcggcgcggttgagaccgcgcttttgcgtctcctccacggcattgaccatcttctccagattctcaagacgatcgccgccatcgcgcacgtcgccaatcgccacggcgtccagcacggtggtgatgccgctggcgaccatcatggcgtcatggctgctcatcgccgagtgggccggccagtctaccttcggccgcggggtaaagaacttgtcgaggttatcggtatgcagctcgataaggcccggcagcagccagccgtcttccccatccagcgcctgcggcagccggctctggctttcggcgaaggcgaggatgcgaccgtcatggacttccagcgaaccgtggaccacctcgtcgtcgagaaccagttttacgttattgataatcatgctgtcattcccatagagtgcagtcggtcggcgacctgacggcgtaccccttcgtcatggaaaatccccacgatggccgcgccgcgcgctttggcatcgtggatcaggttgaccacggcagcactgtttttgccatccagtgaggcggtgggttcatcaaggagcaggatcggatagtcgaccgcaaaaccgcgggcgatgttgacccgctgctgctcgccgccggaaaaggtggacggcgcaaggtgccacaggcgttccggaacgttgaggcgggtcaggagctgggcggctttggcggcgctcgcttcgcgcggcgtcccaagatcgagcagcggctgcatcaccacctccagcgccgaaatgcgcgggatcacccgtagaaactggctgacccagccgatggtggttttgcgcacttccagcaccttgcgtggggtggcggtgaccaggtccacccattcgtcgccgtggcggatatggatatggccgctgtccggcagataattggcgtacagcgaacgcagcagggtcgatttgccgctgccggagtgaccgtggagcaccacgcactccccgacgttaacggtcagcgaggcgtcggccagcaccggcagacgcacgccgtgctgctggtgcagaacaaaggttttatggacgttttcaacgcggatcatgttagctctcacggggttgagttgccgggtggcgcttcgcttacccgacctacgaataacgcacctgtgggccgggtaaggcgcagccgccacccggcaaaacagcatcaattctgcaacaccgacgacaccagcagctgggtgtaaggatggtgcggatcgtcgagcacccggtcggttaagccactctccaccacctggccctgcttcatcaccagcagacggttcgccagcaggcgagcgacgccgagatcgtgggtaacaatcaccaccgccagattcagctccaccgccaggccgcgcagcaggtctagcagccgcgcctgcacggacacatccagcccgccggtgggttcatccataaacaccagcttcggctgggtgaccagattgcgggcgatctgcagacgctgctgcatgccgccggagaaggtggtgggcaggtcgtcgatgcgcgagggcgggatctccacctcctgcagccacttttcggcggtggcgcgaatgttgccgtagtggcgggcgccggtggccattagccgttcgccgatgttgcccccggcggagacctggcgacgcagaccgtccatcgggtgctgatgcactacgccccattcggtgcgcaacaggcgtcggcgttcggcttcgctcatggcgtacagcgagcgctgctggtacagcacctcgccctgctgcggcgtcaggcgggcggagattgccttcagcagggtggttttaccggagccggactcgccgacgatgccgagcacttctcccggccacagctcgaaggagacatcgcgaaaacctttatccggggcgtagagatgggtcaggttattcacagcaagtaatggctggttcattttttctgcccctcgctctgctggcggcaatagtcggtatcggagcagacaaacatccgctgcccgctgtcatccagtaccacttcgtcgaggtagctgtggcgcgagccgcagatggcgcagggctcatcccactcctgcacggtaaagggatggtcgtcgaaatcgagactctccaccggggtatagggcggcacggcgtagatccgcttttcgcgcccggcgccgaacagctgcagcgccggcatcatgtgcattttcgggttatcgaatttcgggatcggcgaagggtccatcacgtagcggccattgaccttcaccggataggcgtaggtggtggcgatatggccgaagcgggcgatatcttcatacagtttcacctgcatgacgccgtactcttccagggcgtgcatggtgcgggtttcggtttcacgcggctcgataaagcgcagtggctccgggatcggcacttggtagatcaggatctgatcctccaccagcggcgtctccgggatccggtggcgggtctggatcagggtggcgtcttcggtacgctcggtggtggcgacgccggtgacgcgcttaaagaactgacgaatcgacaccgcgttggtggtgtcatccgcgccctggtcaatcaccttcagcacgtcgttctcaccgatgacgctggcggtcagctggatgccgccggtgccccagccgtagggcattggcatttcgcgcccgccgaacggcacctggtagccgggaatcgctaccgctttgagaatagcccggcggatcatgcgcttggtttgctcgtcgaggtaagcaaagttatagccagtcagtgggttagccacgttcgttctcccgttgcaggcgtttcagcagcgccagttcggcctggaaatcgacatagtgcggtagcttcagatgcgagacgaagccggccgcttcgacgttatcggcgtgggccagcacaaactcttcatcctgcgccgggccggcaatctcttcgtcatagtccggcgcctgcagcgcacggtcgaccagcgccatggccatcgctttgcgctcgctcatgccgaaggtcaggccgtagccgcgggtgaagtgcggcggctcctcctgcggggcgacgaagccattaaccatctcgcactcggtcagcagcagctcgccaatattgacgctaaagcccagctcttccgggacgatttccacctgcacgtagccgctgcggatctcgccggcaaacggatggttgcggccatagccgcgctgggtcgaataggccagcgccagcaggtagccttcatcgccgcgcatcagctgctgcaggcgcgaggaacgcgagcaggggtagaccggcggggtgcgggtgatatcgtcgggcggcgtgccgcgatcttcctcggtcttcgccagcccctgctgcgtgagcaggctaaagacgtgcggcgtcggctctgcttcgccatcggcttgctgcacagacggcgcttcgccattggccagcagggtaaaatcgagcaggcggtgggtgtagtcgtaagtggggcccagcagctggccgccggggatatctttatacactgcggagatgcggcgttcgaggcgcatctccgcggtattaatcggttcgctgaccgccagccgcggcagggtggtgcggtaggcgcgcagcagaaatattgcttcgatgttatcgccgctggcctgcttcagcgccagcgccgccagttcgcggtcggcgatgccgccctcggtcatcacccggtccaccgccaggctgagctggtcgcctatctgttcgacgctcagttcgggaagccgtccatcgccccgtcgtttctgttcctgtaaggcgtgagcggcgcggatcgccttctcgccgcccttgacggcaacgtacatttagcacacctccacgtgggtggtgcgcgggatcgccagcaggcgctcgccgcaggtgaggatcaggtcgatgcccagcgggaacggatgcgggcgttcggttaattcgtcgatgatgcagtccggcagctgcggcgcgatcattcgctcttcggcaatgcctgccccggtcaggcgcagcatgcgtccgccgctgaggctggcaagctgaacgatcagtgtgacgccggtttccggcgcggtgacggtgccagcggaaaggacgttgagctgctcggcgctgataccgtcattggcgacggcaaaaaccgcctgctgcggctggtccaccagcggcgcgccggtatgaaagcgcagattctgtcccaccagatcgttacgcagagcgctggcgagccagaccggtgtttcatgatcggcaagggtcaacagcaggctggtggaggccacgttcaatggctgccagccgtgctgaagctgctgcagggagacaatcacccccggctcgctcatcgctttcagcagtcgacgaaaactgtgttgggcatcctgcacagccagggtaaaagcgggttgtaaggtcatgcgttatctccgcgaaccagggtaaagaagtcgacccggctggcgttgacttcggcgcgtcgggcttcaatgcgcgcgctgcgtagcgcttccagcggggttatcagagtttccattaaggtgtgaaaatggcggggcgactgcagcagggcgtcgatcgccgcgcagcgttcagcgtgcgggcggtcgcggcctaagatccagctgtaaccgagggtaccgtcagccaggcgtaccgctgcgcgggtaagggtggcgtcgccggcaaagaagcggtcgccgataccgcccatgcgggcctggagctgtaccagcccggtttccggggtgcgaatcaattcatattccggcgccagctgcagggactgcatgcgcgccagaaggtcctgcggttcactgtgggccagcacggacatccagcgctggcgggtggcggtatcgaagtgcattcagtgctccatggtaaattcaatcatgtcggcgcgggtcaggctgacggagtactccgccgtgagcgactcgccctcgcggctattgagcgtgcggacgcagagcagcggcgccatattggggatttccagcagcttgctctcttttgcctgcgcgcggcgggcgctaattttggtgcgtacgcgggtcagttcgacgtcgagccgatcgcgtagcagatcgtgcagcgagccgtggctgaaggtctgtagcaccggccagaagcgcaggtcggcgaagtagtggtcgatcaggcacagggcgacgccattgacccggcgcagggtacgcaggtggatcacgttctcgccctcattgatgccaaaggcttcggcgacatgggcgctggcggggcgcagcaccgacagcagcttttcgctggtgggatcgctgccttgttccagcaggttttggctgaagcgcgcctgggcgttaagcgggtagtcgatggggcgcatcagcaccagcacacccacgccctgacggcgctgaacccagccgcgctcaaccagctggtcgatagcccggcgcagggtgtggcggttaacgtcgaagcgtgtcgccagctgctgctcggcgggcagatagtcgccgcagcgataatggtggcgcagctcctgctcaagtcgggcggcgatttcctgatagcgcgtggggtaactggtcggatgtctggacaggtgcatggtcatcaagcctcacacagcatagacgaggagcttcctcgcgttgtgggccgatcctgaccggtttatgttgcatttcggttaagtgacgatgaccaaaggatgaagagttgatgccaggcggatgacagggcggccgggccgccctgggggcgtcagccttgtttgaccacgttgatcatccaggggacgccaaagcggtcgacgactttgccgaagccgtgggcccagaaggtttcctgccaggccatctcaatgcgcccgccgacagccagcgcgtcgaaccagcgctggccttcagcgacatcgctgggatcgaggacgagggtgaagccggcgtaatgcacatcgggcccgaaggcgctgtcgctcagcatcagctcgccattattgatgcgcaggctggcgtgggcgatagcatcatccgccatcttctggccagacgggcagccgtctgacgcttcctgcgccgggggcggcatttcgccaaaggtcattttaaacatcagctctgcgcccagcgtctgctggtagaaggcgatcgcctcggcgcagttgcccgcaaaggcaaggtagggacttaaggacatggtgaatacctcagtgaccgtaacccgtaaagcgtagtcgcccggcaggcgattgagccagacggcagggcgaaaaggggcgctgaaatatgacggcaggcgacagtgtaaatagcggttgccggagagggaaataacaggatgcgccgggtgacaaacggccaccaggatatcgggagcggcgacggttatgtgaaaaaataatcgcgccgcctacccgaaattaaatcagttctttttcacaaattccgatttgagcttcatcggaccaaaaccgtcaattttgcagtcaatattgtgatcgccttcgacaagacggatatttttcactttggtgccgattttcagcatcgaagagctgcctttaaccttcagatctttcacgacggtaacgctgtcgccatcggccagtaaattgccattggcatctttaacgatcagaatgtcgctctcttccgtcacctcggcagggttccactcatgggcacattccgggcagatgtacatgccgctatcttcataagtgtaagtcgaatcgcattttgggcagtgtggcagttgcatgacgctcctcatgatgtcgtcgaaaaacaggacgttggtcctttaaacagcggctgagagccgaaagtgggtatgattatagcgcaatcacccacttttgtcgggtgtttttttgctaaaaagtagccgtggtattattccgggaaaaagcgaataaacgctgaaattaaccgcccgaagtagagcaaaatcgacgaaataatttccgcgcgatcggcaggaaatgaacttatttattttccgacactctgtaatgaggcggtaaatttctgtgaagttgatcgcagatataaacactgttagggtaaaaaaggggagcaggtcaatttcatcaagcatcacgatgagccgctccatttattcaccagtagccagagcaggcgtcaacaggttcggttgtacattctgtcagcagacagtgcaggcaaacctgctacgcttgaaatgaggagcacagcaattcaccgctcctgacgcacgatgcgaatggccttgccattcggcgaagaggcgtgcactcaaggcggagtagcagaggaaaaatatgcttaaaaggaaaaaaataaagcccatcacccttaaggatgtgaccatcatcgatgatggtaaactgaaaaaggcgatcaccgcggcctccctgggcaacgcgatggagtggttcgatttcggcgtctacggctttgtggcctacgccttaggtaaagtcttcttccccgatgccaacccaagcgtgcagatgattgccgcgctgggtaccttctccgtaccatttttaattcgtccgttaggcggcctgttcttcgggatgctgggcgataaatatggtcggcaaaaaattctcgcgataactatcgtgatcatgtcgataagtactttctgtatcggccttattccgtcgtatgccacgataggtatctgggcaccgatcctgctgctgctgtgtaaaatggcgcaaggcttctcggttggcggtgaatataccggggcgtcgatcttcgtcgcggaatactctcctgaccgcaagcgcggctttatgggcagctggctggactttggctccatcgccgggtttgtgatgggggccggcgtggtggttctcatctccagcgtggtgggtgaacagaactttctcgactggggttggcgtatcccgttcttcctggcgctaccgttaggtatcattggtctctacctgcgccatgcgctggaagagacgccggcgttccagcagcatgttgacaccatggagcagggcgaccgtgaaggactgcaggacgggccgaaggtctcttttaaagagattgccaccaagcactggcgtagcctgctgacctgtatcggtctggtgatttccaccaacgtgacttactacatgctgctgacctacatgccgagctatctgtcgcataacctgcactactcggaagatcatggggtgctgatcatcatcgctatcatggtcgggatgctgtttgtacagccggttatcggtatgctcagcgaccgtttcggccgtcgcccgtttatcctgattggtagcgtggcgctgtttgccctgtcgatcccggccttcattatgatcaacagcaacgtgactggcctgatcttcgccggcctgctgctgctggcggtggtgctgaactgctttatcggggtgatggcctcctcgctgccggcgatgttcccgacgcacatccgcttcagcgccctggccagcgcctttaacatctcggtgctgattgccggtctgacgccaaccctggcggcgtggctggtggagaccacccaaaacctgatgatgccggcgtactacctgatggttatcgcggtggtgggtatggcgacgggcctgtcgatgaaagagacggctaaccgtccgctgaaaggggcgaccccggcggcgtcggatatccaggaagcgaaagaaatccttggcgagcactacgataacatcgagcaaaaaatcgaagatatcgatcaggagatcgccgatctgcaggcaaaacggtcgcgtctggtgcagcagcatccgcgtatcaacgactaaccgttttcactgttaatcatgccgcctggggaaaccccggcggcattttttatgcctccggcaaggccaggccgtgacgccgctgctggctgagtttacggtactgctgcggcggcatgcccacgtagcgggtaaaggtgctgtagaagcgactgctggagcgaaaaccggcggtaagggcaatatccaggatggtcttgtcggtatcgctcagcagcgcccgcacatgattgatacgcatggcggtaatgtactgcttcatggtctgctgcatcacccgctgaaagacccccatcgcgtagttcgggttgagcttcacgtgctcggcaacggcattgacggtcagcgcctggtcgtagtgggcagcgataaactccagcatctggctgacataaaactgcgcgtggcgcgagacgctgttcttgtgggtgcgtgaggttttattgaccagaatcggctgccagccggcgaggctcagccgcttcagcatcagggcgatttcatcgatcgccagctggcgtatctgttcattctcgtggctcagttcctgctgccagcggcgtacttcgaaggcgctcaactgctgcgcggcgagggatttaatcaccatcccatgggtgacgtggttgataagctcccggtccagcggccatgagagaaacagatgcatcggcaggttgaatatcgccatctgctggcaatcgccggggcgggtcagctgatgcggcgtacaggcccagaacagagtgatatagcctttctcaatgcgcaccacttcgttattaatcaaatactcgacgtcgccatcgaacggcacgttgacctccacctggccgtgccagtgactggtgggcatggcgtgcggcgggcgcagttcgatatccatacgctgatactcggagtagagcgccagcgggctgcggctctgcttttcgtcgctgctgcacataaagggatcggggggcagagaggtgaagcggtgttccatcgttagcgtattcctgaattgtcagagtggctgcatttttcgccagaactgacgacagcttagcggaagaatcggcccattttctctcctttttgctcaatctgttcccgaaatctcagattttgtggcgcttaatggccgatctgagctttcgggaatgctccggcgggaacagggcagcgcagcggggagcggcgtgccactctgcaagtgttcaatgacctgatggagagtgcgtgatgtctgccccaaaaattacttttatcggcgccggttcgacggtgttcgtcaaaaatattctcggtgatgttttccagcgcccggcgctgaaatcggcgcatatcgcgctgatggatatcgatgaaacccggctggaagagtcgcatatcgtggtgcgcaagctgatggattccgtgggcgcgaacggcgaaatcagctgccaccgcgaccggaaaaccgccctgcagggcgccgattttgtcgtcgttgccttccagattggcggctatgagccctgtaccgtcaccgattttgcagtctgcaagcgccacggcctggagcagaccattgccgatacgctggggccgggaggcattatgcgcgcgctgcgcaccatcccgcacctgtgggctatctgcgacgatatgagcgaggtctgcccggacgccaccatgcttaactacgtcaacccgatggcgatgaacacctgggcgatgtatgcccgctacccgcatatcaagcaggtgggtctgtgccactcggtgcaaggcacagcggaagagctggcgcgcgacctcgatctcgatccggcggatttacgctaccgctgcgcggggattaaccatatggcgttctatctgtcgctggagaaaaagctcgcggacggcagctacgtcagtatctaccccgacctgctacaggcctacgccgacggacgggcgccgaaaccgaacctgcacggcaacccgcgctgcgaaaacatcgtccgctatgaaatgctcaaaaagctgggctactttgtcaccgagtcctcggagcatttcgcggaatacacgccatggtttatcaagccgggccgcgatgaccttctcgctcgctataaagtgccgctggatgaataccctaaacgctgcgtcgagcaactggccaactggcatcaggagctggagagctataagcgcggggagcgcattgaggtgaaaccctcccgcgaatatgccagcaccatcatgaacgccatctggaccggcgagccaagcgtggtgtacggcaacgtgcgaaacgataatctcatcgacaacctgcctcagggctgctgtgtggaagtggcctgcctggtggacgccaacggcatccagccgaccaaagtgggcgcgctgccggcgcatctggcggcgctgatgcagaccaatatcaacgtgcagacgctgctcacggaggcgatcctcaccgaaaatcgcgattacgtctattacgccacgatgatggatccgcacaccgccgcggtgctggggatcgaagagatctacgcgctggtggacgatctgatcgccagccacggcgactggctgccggcctggctgcaccgttaatcctcttatgccgccgggggcaacgaacccggcggtgcctgtcacgctctatcaaacgctgaaggaggcgctggcgacagcgacctggaccctatgagtatttcaatgacaacaaagctcagctacggatttggtgcctttggtaaagatttcgctatcggtatcgtctacatgtacctgatgtattactacaccgatattgttggcttatcggtcggggtggttggcaccttgttcctggtggcaaggatcctcgatgcgatagccgatccgattatgggatggatcgttaactgtacgcggtcgcgatggggaaagttcaaaccgtggatcctgatcggcacgataaccaactcggtggtgctgtatatgctgttcagcgcccaccatttcagcggcggggcgctgctggcgtgggtgtggctaacctacctgctgtggggcttcacctacaccatcatggatgtgccgttctggtcgttggtgccgaccattaccctcgataaacgcgaacgcgagcagctggtgccttacccgcgctttttcgccagtctggcgggatttgtcacggccggcgtcacgctgccgttcgtcaacgccgtcggcggcgccgatcgcggtttcggttttcagatgttcactctggtgctgatcgccttcttcgtcgtttccaccctcgtcaccctgcgcaacgtgcatgaggtttactcctccgacagtggtgtgagcgaagactccagccacctctcactgcgccagatggtggcgctgatctataaaaacgatcagctggcctgcctgttaggcatggcgctggcctataacacggcggcgaacattatcgctggctttgcgatttactactttacctacgtgattggcagcgcggagatgttcccgtattacatgtcctacgccggggcggcgaatttgctgacgctgatcctgttcccacgactggtaaaagggctatcgcggcgcattctgtgggcgggtgcttcgatcatgccggtgctgggctgcggcgtgctgttgctgatggcgctgggcggcgtttacaacatcgcgctgatttcgctggccggggtgctgttgaatatcggcaccgcgctgttctgggtgctgcaggttattatggtggccgataccgtcgactatggcgaatatacgatgaatatccgctgcgaaagcatcgcctattccgttcaaacgctggtagtcaaagccggttcggcgtttgcggcctggtttatcgctatcgtgctcggtatcatcggttacgtgccgaatgttgtgcagtcgccccacacgctgctggggatgcaggcgattatgattgcgctgccgacgctcttttttgctctgacgctgtttctctatttccgttattacaaactgaatggcgatatgctgcgacggattcagattcacctgctggataaatatcgccgggtaccggaaaatgacgtcgagccggaacggccgattgtggtacccaatcaggtgtaaaaagcgtgcgaaaaccgctgacgaaagaggggagggatgctctctttttgagcaaaaaacagtgtcttaaaaagacagaaagagaaaactgtagttctctattttatctcaattatttctctttttgagcgttctggactgtttgtttctccgattgttctcaaataaaactcagaattgtctctttttcgtgctcttgcgctgctttttaactcttgctactctttttgggtcttacatttttctcttatttgtctcagtgatggagcaatgcaatgcgcatttttatcgatgatggttcaaccaatatcaaaatgctgtgggagcaagatggcgaaactttcacccatatcagccccaacagttttaaacgcggctggtctgccaccttcggttcggggaagccttttaactacacggtggatgatgaaaagtactcattcgacctgatcactcccgatgcgctcccaaccaataacattgactggcaatatagcccgttgaactccatcgctgtccatcatgcgctgctgaccagcggtcttgagccacaggatgttgaaattgtggtcaccctgccgctgaccgaattttatgatgaagatgcgcaatatcgcctcgacaatattgagcgcaagaaaaagagcctgctgcgcgaagttaaactgaataaaggcgtggtgttcaatatcactaaagttaccgtgcgcccggaatcgattccggcgggcattagcctgtgtgatgagctgaaaccgtcgcattcggtgctgattatcgaccttggcggcaccacgctggatatttcaatggtcgccgggcagatgacctcggtttcgcgcatttacggcgacccgaagctgggcgtatcgctggtgaccgacgccgttaagctggcgctggcccgggcgaataccgacacctctagctataacgtcgaccagataatcatcaaccgccacgacgaagaatacctgaccgacaacatcaacgatccggatgcggtttctgaggtgaagaaggtgatcaataacagtatcgaacgtctgaccacgcgtgtcctgacggccatcgatagctttaaaggctattcgcacgcgatcgtcattggcggcggcgcgccgctggttgccgacgccattcgtgaacggatgggtctgcgcgaggatcgtttcgtggtggctgaagagccgcagtttgccctggtgcgtggtctgaaaattattggttaaggagcgtctatgactctggatcgcagaaaagtgctgatttacctgcgcccggatatcagcgccagcgagcgcttcgcggacgcaaaaattgaggcccatcaccgtggcgaccgcggcgatatgtcgcgtaccgcgctgctggcggggctagcgttaggggaagtcgatagccgcttaccgtcgatgctggcggcgctgctggcggaagatactaaaccggaaacgctgcgtaagatgctggcctcgttccttgagatccagccggcctctcccgccccggcagccgcgccagcagccgccccggctaaggcgccggagccgcccgcgccggtgagcgagagcgtctccgcgcgtaatctcgccggttcgttaccggattaagcgctattcccggtttgcgcgacccgggaaactccccggcttgcgctgcgcttagtttgtaggccgggtatggcgtagccgccattcggcaaacaggcggctccctggctggggtcatgcccggcggcgctacgcttgcgcgggcctacggatccagtgtaatggtgggtccagtaccatttgtaggccgggtaaggcgtagccgccacccggcatacaggcggctccctggctggggccatgcccggcggcgctacgcttgcgcgggtctacaaatccagtgcaatggtgggaccagtgccatttgtaggccgggtaaggcgtagccgccacccggcatacaggcggctccctggctggggccatgcccggcggcgctacgcttgcgcgggcctacggatccagttcaatggtgggccctgtgccatttgtaggccgggtaaggcgtagccgccacccggcatacaggcggctcccaggctggggccatgcccggcggcgctacgcttgcgcgggcctacaaatccagtgcaatggtgggcccagtgccgtttgtaggccgggtatggcgtagccgccacccggcatacaggcggctcccaggctggggccatgcccggcggcgctacgcttgcgcgggcctacggatccagtgcaatggtgggtccagtgccgtttgtaggccgggtaaggcgtagccgccacccggcatacaggcggctccctggctggggccatgcccggcggcgctacgcttgcgcgggcctacggatccagtgcaatgggtgggctcgatgtcatttgtaggccgggtaaggcgtagccgccacccggcatacaggcggctccctggctggggccatgcccggcggcgctacgcttgcgcgggcctacggatccagttcaatggtgggctccagtgccgtttgtatgccgggtatggcgtagccgccacccggcatacaggcggctccctggctggggtcatgcccggcggcgctacgcttgcgcgggcctacggatccagtgtaatggtgggtccagtaccatttgtaggccgggtaaggcgtagccgccacccggcgcgaagacggaacgccacgacccgggatggcacccctatccgtgggcgaggaagcgcgccaggcgctgctgcagcaggcgattttcgcgggtcagccgcgcgttctcatccagcagggtcagcgccaccgcaattcccggccagtccagctccagctcgttacgcaggcgtaccgcgcgatgcacgatcgtcaccgcgctgtcgtcgaacagccaggtgtccgcctgcggctggtgtggctcaatcatccctaagccgacgatctccgtcagctcctcttccgacaccccggtacgcaggcacaattcggtaatggtaaacgtcactgttactgtagccatcaggctttcccccatgtcttacgcggatcgaagctggcttcggcggcggccaattgttgccagagctcacgcgctttttcatctggttttgtcggcatcactattttaataacggcgaacaaatcgccggtgtgggttttgctcacgagtcctttccctttgatacgcagtcgctgccctgcctgactgcccggcggcaccgtcagcagaatgctctctttcagggtgggcaccgtcactttcgcgcccagcgcggcctcccatggcgccagcggcaggacgatctccaggttatgaccgacaatatcgaatagcggatgcggggcgatgtggataaccagccacagatcgccgttcgggccgccattctcccccggcgtcccctggcctttcaggcggatacgctgaccatcgactaccccggcggggatcttcacattcagcgttttcggcgtttcgctttcgatcatgccaaacacgttgtacaccggcaggttatagctgatagtgcgcgtctgctcggccagcgtctcttcaaggaacaccgccacttcgatctccagatcgtggccgcgcgccgcgtgttgacgacgacgctgatgcgcctgctggccaaacatggaggagaagatgtcgtcgaaatcttgctgactgtagctctgctcgtgggtctgtcgctggcgaccgaagccgggatcgttgcgatgctgccagagctgatcgtattcggcgcgccgttgctcatctttcaggacttcccaggcttcggcgagatccttaaatttggcttcggcatcgttttctttactgacgtcggggtgatatttgcgcgccaggcggcggtaggcggtcttgatggttttcagatcgtcggttggttgcaccccgagaatggcataataatccttcaattccatgattttatctcatctatgctcagtgcggtggttacatattccctggaacaggcgtcagtataaagcgtagggcaaatgcgccctgacggggaagaaaagtggcggaaacttgacgccgtcggggtcgacggcgccgtggataagattagtctttcgcctgcggccgtgggcggcggcgccatccggtgaatagcaccagcagcgcgccgacggcgccagccaggcgcgcggtgccctcgccggcgctgggaaacagctggcgaatggtagggtcgctgaccagcattgacccggcaatccagccgatgagcatcccgcccagcagcaccaccgcgggaaagcgggtgagcaggaccagcaccagcttgctgccggcgacaataaccggaatgctgatcgccacgccgagggcgaccagcgcaatgtgccctttccccgcagcagctaccgccagtacgttatccagcgacataatcacatcggcaacggtgatggtgatcgcggtgcgccacaggctgccagagctgctaacctcgctctcttcttcctcattcctgaccagcttgatgccaatccacagcaggagcagcgcgccgactattttcagccacggcagcgacaggagatacaaagcgatcgccagcagcagaacgcgcgccaggatggcgcccacggtaccgatgatgatcgctttggtgcgtttctgcggcggcagtttgcggcaggccatggcgatcaccacggcattgtcgccacccagcagtaagtcgatggcgacaatctgcagcataatcactgccatgtcccattgttgaagaaatgcatgcatatcgagagaaaccacctgaaaaaagagcaagaaaaaccgctgcgcagggtactccgcctgggccgcgttgaccactggcgcagacctgcgctatcgcgcgggaaagagagagcctgaaaaataaagttacgaatcaaggcgccgttgggcaaggcttcggcgaaaaagggtgatattttgtcacccagactcacctgccgttcacttatcgcaaggatccccactatgtctggccacaagaaatacctctctgtcgccctgctgagcgctgtcttactgccggcgatggcctctgccgctgacgcgccggcgactttcaccccggaacaggaggcgaaaatcggcaaaatagccgccgactatctggttgcccacccggaagtcctgctgcaggcgagccagaaactgcagcaaattcaggctgagcagcaggccagcgcggccactcaggcggtgctgaagaacgccgccgtgttgacccaggataaaaataccccgacctacggcccggccaacggcaaagtcacggtgatcgaattcttcgactaccagtgcgtctactgcagccgtctggcgccggtgatggagcaggtgattaaagcgcacccgcagacccgcttcgccttcaaagagtggccgattttcggcggccgctgggaaagctcgctggaggcggcaaaaaccggcctgcagatctatcaacagaaaggggcggatgcctatctggcctaccataacgggatttacgctaccggccataacgaaggcaagctgacgacggcggatatccagcagcaggcgaagaaagccggcttcgatgcgaagaaggccgccgacgtcgaaccggtgctgcagagcattaacgatctggcgcaggagattggtctgagcggcacgccgggcgtgatcgtgatgccgaccaccggcgccacggaagccagcatcaccgtcttcccggggctggcagacaaagcctcgctggaagccgccatcaaaaaagccggcggctaatccccggcgtattacctgtccaggccgccgacggcggccttgctctcatgcgtcatcgctctcttcctgcggcggtggtaacgcgtggctttttaaatcaataatctgcccgatttgatcgtggtaaacggtgagcaaattatagcggctcatctccgagataatctgcggcgcgacgttaaagctgctcgccagctcatcgtcgcgcagagcgagcaccgcggtatgacgccgggtatgggcgcggcgccggttgtagtgataccagaggatcaacagccagccgttcagcgcggcaatcagcagatacatcagcgccgtattcagggagtccatcagcgtttcccagttcggagagggcggcgcgatgaactgcatcagcaaattggcgtacagaaagaacagaaaaccgagccaggccagcagcgttaagccggcgtcgaccagccggggcagcacccgatgttcggttaagatgagcgtattttcattcatcacaggcttccttttccccggtccggactcacccagcgcgcgcgggaacgttgacgtttcaccatcactttcggaaaagcgaccagcgtggtcagcaggccgatcatccagtagaccatcgggaaccagatcacccagaacagcgatttggcgacctttttctcatagcgccgctcgatatacaggctggcgacgaactgcagcaggcacatcaggccgagcagcatgccggtgaattccggtggaaacaggctatgcaccgccagattgtcaggcagcggtatcaggcggctgaggataaacagcagaatggtgatcgcgtaggcaaaggcccacagcgtggagcaggcatactccagaaacagcggccacatccggtgatgctgccagtgaaacaggcggcgcagattgaccagaaagacttcggcgccgccctgggcccagcgcagacgctgcttccataaccctttgagggtctccggcatcaggatccagcacagcgctcgcggctcgaaaaagatgtcccagtggcggagctgaagcttccagctgatatcaatatcttcagtgatcatatccgggctccagtagccgacgtccgccagcgcctggcgccggaaggcggcgattacgccggagacggtaaagacccggccatagatccgctgcgtccgtttgataagcccaatgatcgacgagaactccccaacctgaatgcggccgatcagcgtggatcgggtgcggatccgcggattgccggtgaccgccccgacgtgcggataatggatcaacggcgcgaccagccaggccgcggtatcccggtccagcagggcgtcgccatcgatgcagaccagcagatcgccgcgggcggcggcggcgcccgctttgagcgccaccgcttttccctgattggcggccagatggatcacccgcagcctcggctcctcctgcgccagctgctggagcacctgggcggtgttgtccgaagagccgtcgttaatcgcgatcacttcaagattggcgtaacgctgggccagcgctgcgctgatggtttcccgggcgtttttctcctcgttaaagcaggggatcaggatcgagatcagtggattgcccggcagcgtcggcggcggggtatcctccccccacggccagtgacgttccagctgaaaccagaagtagagacccccggtgatccacaacactgacataaacagcggccagaaaaagacaaagtcgaggataagctcgccggtaaataccgctgcgacacctaacggcagcccgaatacgaggcataaaatgcacaatgcgataatgcgatcagtcatggtcagggtaccaccaggaagaaaattgcggcctgatacgagagatatcaggctggttgttaataaaatcgtcagggtagtagccgtagtttttgacgccgttcagccgcagcaaacgcatccagtccgccagctgctggtcgggaatggcgttttgctggcgtcgattccagtctctggcctgcagttcaaagatggttttcttcagcgcacccgggtggcgggcgacggcctgcaccagccgcgtcagccaggcctggctggcgtcgatcggcacggactccatcagcggcatcgccatggggaccgtccagtcataggcggcaaggaagtcatccagattctgcgcaaaccaggcttcgctttgcggctccaggatcggcagggcgaagagattacgcgccgttttcacctgcgggccgcggatggcctgcactgcctggcgtagatccagagtgaagcgggtcagggtttggcttttgaaacgcatccatgcctggcgctcttgcggacgttggggcaccgggtcggcatcgtgcgccatacccgtctgccgccaggcggcgaccgcctccggactcacgtcttcaaaatcggtcagcacggcgtcgtcgtgaaacaggatcccgctgaagctggcgtgtcgggccagatcttcgtagatgtcggtgatctgctggcgaacccggggatcccagggcgacagacggacgtacggctggcgggcaagtaacgccttcccggtttgcggatcccagcgctgaacgcgcggcagatctgaggcaagatcgaaggccagcaccggcatccaggcataaaccttcacattgccgcgggtctgcaactgccaggagacgaagttaaacaggtcggcgcgcatcggcagccagcggttggggaaatagagcgacttgaccgtgccgtcgccctgcgggtcggagaaggcctgcagaaagacgtggctgattttcatgtcatagacgcgctgcaccagcttatcgatattctttgcctgctggacgggattggggtcatagacatagtccagatccacatgcatcacccgaacaggatcggcttcctgaatctgggtcacggcgctggcaaaggccttgagcgacgggttaccggcgatcagcaggcgtggaatattgtccagatccttcacgttgcccaggccgtcgttcagcgtaaacgccagctgatacccttgctgtttggcgatggccagggtgctgccgctggcggcgccgtagggccacacccaggcgcgcggcgttttcccggcaacctcatggattttcgccgtcactttctgcacgtcatcggtcattcgccgggtaaactgcgcgtcgctttcatagcggccggtggttttatcccagccgcggttggcggcggcaggctcgcggctgccctgcggattggccggcagaccgtagtgcgaggcccaggtgtgcgcgccgatctccaccagcggcgagcggctgagctcgcgcaccatctcccaggtagcgaagcgctcgcgcggcgtcatcaggccgccaaaattaacgggctgaccagcgggagtgtccacccagctgcccaccggcgcccatagcgccgggacgttccaggctttaagcagcggccatacgcgggtgtaaaagctgctgtaaccatcgtcaaaactgaggagaaaagccttgggcggcagcgactttaagccataatgcgcatcgagaatgtcctgaacgctaatcgcatggtagccgttatgcagcagccaggcgatctgctcattgagtgcgctggtgcgcaccgaaagataacgctggtcggcggcatcgtcttcgacgtcatggtaggccagcaccagaaagcgatccgccggccagggttgattggcctccagttgggggcgctgctgcggggcgaggaaggggacttcctcagcacgcacgctgaagataaggcacagccagatgagaagcatcaggccgttgcgcaggatcgtgttcagcatggtcatccttaaaaccgtatatttgcatcaagagtgatggcgaggttgttttcacgtttgccgtcgtaggggcgcttatcccagttcagcatcaccccggtgtcgacgacgttgttccagcgcaggcgctgcccgtaacccagcaccgtgatcgccccggcggcgtgatttttttgccagtagctgccgccgccggcgagtaactgctggctccagacggtgtcatagcgctggtaaagcgtgtgatcgacggccagcgccgcggtggcggcgaggtcccgtgccggactgtagtaggcggtgtcggtgcggctattggcgctggccgacagaccgggctgcaaatccagcgttaaccatggggtttgccagaggcgttctttaccggagagggtgtactcatggcggcggttgcgatcggtaaaccggctggcggccgcgctgacgcggtactcccggcgttcgtttggagaccagcgcagccagccttcgccgcggttggcgctgacgccgttgcgtaacgcgcgcagcggcgtctgctgcgaaatccgctccagttcgccgcccagctgccagcgatcgctaacgtcatgggcggcggaaaggcggacgccgggcttgttctcgccgtgaaaattgacgctggagagctcaagctcgccccagtagtcgcgcggacgccattcaataccggcaaacagctggcgacggctgcctttcccctcttcaaaattgccttcagcgaagcggtgcccgccgaacaaccgccagctgtcggctagcggcgggctgtagatcgccgtctcaaaactgaggtcgtgcgtgccgctcaccgggttgtcggaatgcagccctttgccaacgctcaggcgcagctcggagagataatggatctcgcgcgctctggccaggcgctgggtgttcagatcccgtggcgagcgggcgacgacgtcgtcagccagcagatccatttgccgccactcctgcagatcgagggcgacccaggcctgctggcgctccagctgcaggctggcgggttccagagattccgccgcttttagctggcgttcggctgcccgtggcaatcctctctcctgcagaagggcggcatagtctatctgcaggccctggtttccaggggccgtcgccgccaggcgctgcattcgggcttcggcctgcggcaggtcgttggtagccgctaaatagtgcacgttaagcgactgtgcggtgagccagtcgtcgttcggctgcggcgttggcgagccgtagagacgacggatgtagggcgcattcctggtgaggcgggcgacataccgttgcgcctccgggtactgaccggtgtccagcagagcgtagaaaagctcgtgttcctcattctgttggcttgtcagccacgaaggatgctggtggataagcgtcagcgcaggctcaatttgcttaagggcgataaaagaggagatgacccagccgatggcccagtcgggaacggtctgctgctgggcgatcaggctttggtattcgcggatgacctgcgcgtactcggcgctggcgtacagcgcgcccagacgatcaatacgcgcccggatgatgtcgggcgcagcctgtgggtcggggtgccaggcggcgatcatcgcgtcatactgcgtgagcgccgtgcgggccagcgcgtaacgcgccttttcttcgcgggaaggggtatcggcaaggcgcaccagttcggcggcggcgttcagctgcaagttacgcttttccgcaggcgtcagttcgacgctattcgccaggccgagagcaggggaatcaatccggttgcgggtcagggtcgccatcaggctggccagcgcggttttgttttgcggttcacgatcgaggatctgcgtgtccaccaacagctggtcccagcttttgcccagccgcaggtagacataggagagcgtctgcaggtgcgcaacgctcgcctgctccgccaccaggcgacgcgcttcgctgagcgcctcgccgtccttgcgggcatcggcgagcgttttgatatagccgatacgatagtcgtcgctgccaggggcctggctgagcgcctgctgccagagggtgagcgaggtttgccactgcttctggttgcgcagggcctgcgccgcggcggcggtgccccgtgcaggaagcggcatatagacctggtagcgtcgccagactttcaccacttcatcgtcctgaccggcccagagggccacctgcagccagtccgccacctgagaaggggttaaggcatgccgcagctggtactgctgaaggtaactgagaaagggggcgtactgaccttggcgcgcttgcaagatttgctggtcatagagcgaatccgctccctgaaccagcgccgggaagagcaaaagcaagccgattgatagcgagagtttcgtgttgcgattaaacaataacgtatttgaataaggtgatctttccatttctatttgccatatgttcatcaagaatccattgcacaacacgaccgtcctttgacggtgagttaaaggatgaggatggtcccatttagctgactggcactgcaggtgaatgacctattgcaaactaataaacatatctcctgttgataaatgaatgggtaatttatacccgatacggcaaccgataaatatggataaattatggcctgcgttttaagataattctgtaaaatcgacttcgttcgaacggaagtgttcaagttgatttctttaacctactgatataaataaaaaagaaagtcagatggaattttgtttcaaaatggcggtgtgacttatatttagttggggttagagttttttaggtaatatttaagatgatttctgacaaaaattctcaatagcaaaaaaagcatcttttctgtggattttttttatttataatcaatctgtttatttcctgtcagaacgcaaggagggttttcacagccagattcagatgccgcgctaatgataaatcacaggtctcgttattttcaccgccatgcgaagcgttccatagggggagggaaaacgtctggttgacgagaatttgttgattaaatgttaaagggacgatttgtggcaactttaatgatattggttacccaggattactatctttttcaaggtgttaagaatttttttcctgatatcattcagttagattctagcggaaaagcgattttagataatgaggttgatgaagtctctctgctggttgatagccgctcgccgctttgccattacgattatctcgtgctggcagcggcgaaatccagaaagcgaatatgttgtatcgtcctcgatatgcgccatcgggaagagcatttactgagcctgaaatcgtttttaaacatgtcattatcacccgcggatatggcgacattatttggcctttttctggagatgaatagcaagcgtctgaccaaagagtggtttgacgatctgcgcttaagtttgtctgaacagttaatgttacgtttactcatggcggggatgaccatggaggaggtggccgtcaatctcaatacgtcactaaaaagcctttaccgcaagcgtactgcgctttatgagcggttggggttagataattttaatgaagcttgcttatttatctttcgaaataagctgctggagcagaccgaacgttcgttatgaagcttcgctgtacagagaatggatgttatcgcaaggtatttgttgacgaaaatctaataaattaaatagatattgataggtacaaccgtcgatacccggcggtatcgatgatggcattcggcatataattccggagctctttggaagtatttaccgccaatgcggtttgctatgcacagcgattattataatgaatatattccttgcgccgcacaggaatagttttgtcataaattaacactaccatggtattccgactcacgcgtcggaataccatgagatatcgtgaaagcatcagaggagcgaggtggatgagaataagggacagtattgctgagcggttagaggcatgcggcctctaccgtcgggcggcatccagatggattgaggtgatgcagcgttgcctggacgatgaggaccgagagtggatccgtcaccatcgcaatcagtgtctgaaaaaggcgcaacgtccgccggcgccgaaagaggagtttgccgacctccaccaggcggcgaaagagactcaatatcgtatgggcattgcgaagccctatggcgaagcattcagactgcccggcaaagggaaaacggccgccgagtaatgcctttcttcacgacgtttgcctgacggcttcgccttatccggcctgcggctcctccacaggtttaaacagcgcaggcccgcgcaagcgcagcgccgccgggcgatacacatcagacggcgtacccgcggttgtgcctgatggcggcataaatgccttatcctgcttacaaatggcattgggtccacccatgacattcgtccgtaggtccgcgcaagagcatggggtcagttcattgctgggcggttttttcgttttcaaagcaagagaatacgcatgaaaaaaggatctcaagaagatccttgtgatgtcacgttcagccgttaacaattacgttaatacgactcatatttaagcccgtaattcctactccacctaacgtcaaaaaggggctttctatcaatacaccgatcctctgtcgggatgtcgttaaaacaaaaaacctcatcggtagaaaacagtaggttttcatccggttccgtgcgatatccatccccaaaatcaacaatccatacatggtaaaagccgtctttaccctcgtgtggaatcccgtacttcgcctgtattacggccttattggcttcccaccaggctatctgacgacttttcaggtatggaaaatgcctgaccagaatcgtatttccatcgtgaactgccacaatctcaaccggggacagatactgccatagtagataaccacctaccgcagccgctacaacccccgctatcagtcgcttattcaccccgcctcccgctgatttccacggtcgcattcatctcggtgatgaacggcctatagccgtatttcacatagcgctgcagcacaaaccagatccggaaaattcggccctgatgaaaaacagggttcaggatatccgcgtcatcaagcccgaagtggtcctgtacccggtagtgtactttcgcccggtagctgtcgcccgtcacctccagtgactcgagcgtgatatgcgtcgaccacgtatcatggacggtaatcaccagcccgttagtcttatcgatctgacgatcaaatttaggtagaacagctttattaacttccttaaagttgccctttccgtcgaataaatcgtcctttttaccgagaggaagaaatccatattcgtagctaacagcatcatccaaggcccttttaatccccaacaacgagctatcactcgaatggtcattcaggatctgctctttcagcgccctgtccagtaatgggctgctgtacggtgtgccgctgttcccctgcatatgattaatcatttcggtgatgatgtttttatatgggccatggaaggagaataccttggcaagtccccggaactcatcaaacatcagccggacactttcctcccggctgaccacgaccggcgtacttcccgtcaggctgcccggataaaatacaccatacgaactggcgggcgctggtgggacaagggtcagcgtatacgggttcactttcgccgagacatccgtcagaccaaagcgctctttcagtgcttcctcgctcagatcaccgtggtgcatgtcctttgcgccgtagtcatccattgccctctgcgtggcataaatcagcgccggaaggggcattggctgaggccctttagccttcgcctcattcagttttttcctgctggcttccctctcccgttcggcagccagcccggcattgcagttatattcgtaggtgttatccaaatcttgcggaatgaatttcgcccgacacgggcaggagctgtaactttcgatggagcctgctagctggcggtttacaccgcctacttcgtacatgtcgcccatgccaccacaaatacggtagatccccggatgttttccgcaggtcactttatcgctttcccgcgcctgtgatcgcccgaaaaattcggtgtcttcagcaccggtgataattttaccgccacagacggtacgatctccctggaaaagaaaatagccttccagcgccatcagtgcttatctcccggcacagttaaaaagccatccggcagtgcatcgccctcacggaatacaaacatctgacacccctgaggtgttgaaatgatttcatcaccgttatccagcatgctgcccacgagcgccatcgattccccctgcatcacccgacctttaccggctccgcaaataatggtcgcctcacgtccatccggatacacaactttatctccgacccgcgcagaatagtgcccgtcaagggtacttttgccggatgtctcacggatcacgccaccatgacgggtcaggctgccaatcgttgcaccccggaaaatatggagaacagggcgctgtaacattgattccatttctgcgacgagtgactgacgcgactgtggctcaagttctgacagaaactcatcggtaaatggcggctgacgcagccgttccagtacatcagtggtcagttcattggtgtattgctgtgacatggtaaatccttttagtgtatctggttgctcattccgctctgagcgatcatggattagaattgaagttcgatcagtgtttcgcatctgttcgatcaatcgggatgcgttaactttttatagtgcttttaacctgtttttccctcgctttccactaccagcgagcttttcctcatcgacttaccctgcagaaccaccctgcgcgcgttttatacagcagcctgtccaggattacgtctgccgttgtcaggatctccatcagtccatgctgtccactgggaactgattcactacgatggtactgctttggccgtaatggtcttaagtgatctccagcaggcgtttcttcgtcctccaggcccgtgcaagcgcagcgccgccgggcgatacacattagacgccgtacccgcggttgtgccggatggcggcataaatgccttatccggcctacgggccctccagcaggcgtttcttcgtcctccaggcccgcgcaagcgcagcgccgccgtgcgatacacatcagacaccgtacccgcggttgtgccggatggcggcataaatgccttatccggcctgcgggtcctccacaggctcaaacagcgtaggcccgcgcaagcgcagcgccgccgggcgatacacatcagataccgtacccgcggttgtgccggatggcggcataaatgccttatccggcctgcgggtcctccacaggttcaagcagcgtaggcccgtgcaagcgcatggactgcaccccaaaagttggacacccaactgagtaaggtgcaattttatggctaaaccaaagtattcccctgaaacaaaactggctgtggttaatcattatttgtccggtaaagacggagaacagagtacagccgacctttttggtattgaaagaacatctgtccgtcgctgggtcagggcatggcagttccacggtgcagaaggcctgactgcaaaaaataatcattattccgatgaatttaaactcgtggtcgtccgggcggttatcagtgaccgcctgacgatgcgtgaagcggctgcccggtttaatctctccgcagaaatacttgtccggcgctggctcgacgtgtacaacgatgccggagcggaaggtcttttaaacatgcaatgcggacggcccggacaaatgacaaagccaaaaaatatcccaccactgacagataaagagctggaaaaactctcccccgaagaactcagggccgaactgcgttatctgcgggcagagaatgcctatctaaaaaagttgaaagccttggttcagagcgaaaaaaatggcaaaaagccctgataatcagtgaactaaggcatgaacacgctctgcgggaccttctgcgggcggccggtatgtcccgtagcacgtggtattacaatatgaatgcactgaagcaaggggacaggtatgcgggtcttaaagagaacatcaggaagatataccactatcacaaaggtcgttatggctaccgcaggatcacgctcgtactgagaaaacaggggctgcggataaaccataaaacagtgcagcggctgatggcagaactgtcactccggtctgtgataagggcgaaaaaatatcgtgcctggaaagggagaacgggcgaggccgcgcccaatatcctgagccggaacttcggtgcgtcaaaagccaacgaaaaatgggtaacagatgtgacagagttcccggtacagggaaaaaagctttacctgtcgtcagttctcgatctgtttaaccgggaggttatcgcctacagcctgtcggaaaggccggtgatggagatggtgaatacgatgctggacggtgcgttcccgaagctcagaccgggagatgctccgctgctgcactcggatcagggctggcattacaggatgaggagctatcaggaacgtttaaaggcgcatgggatgacgcagagtatgtcgcgtaaaggaaactgcctggataatgcagtgatggaaaacttcttcgggaccctgaaatcggagtgtttttatctgagggagttcaggagtgtcagtgcgctaagaaaagccgtagaggactatatccattactacaacaacgagcggataagcctgaaattaaaaggcctgagtccggtagagtaccgaacccaggctctgagagccgcttaatatgaaccatccaactttatggggtcagtccagcagcgccgccgggcgatacacatcagacgccgtacccgcggttgtgccggatggcggcataaatgccttatccggcctgcgggtcctccacaggttcaaacagcctaggcccgcgcaagcgcagcgccgccgggcagagggtgatagaacggagttcgatgaagagtccggatgcagaaaagcaaaaacccgccttttgggcggtttctttaaatagtggtgcccggactcggactaacgccgcaggcgttgaacagcgcgcttgccgcgctggccccgaaggggtgagccgctgtgcggcgaataatcgaacggagttcgatgaagagtccggatgcagaaaagcaaaaacccgccttttgggcgggttctttaaatagtggtgcccggactcggaatcgaaccaaggacacggggattttcaatcccctgctctaccgactgagctatccgggcaacggggcgcattaaaccgtaatccgcccaccccgtcaaccaaatttcttaaattacttatcgattgcttatctttgcggcaattctgcgttcaaaggcgcgttttggcttaacttcactgcatgccgttatcgccctcgcgggttttccagccgctggtaatggcgataacgtggcgtagtccggagatgagataatcgccaatgacctcctcgtcctcacgcggcgagctcagggtaatttccgcatccacgccgtggcgataggcgccatgatggctgaaaatggtgccgatataacacttcccgttcagccagaccggaatataggccaccgtctcatagatatagttaacggcgacgccgctgtagtagttatccgcctcgtcagcggaggtgcccggcgggatggggcagatcggcgcgtcgttgtcgctggcgggtctgtctttcagcaggctgccctgcattacctccagcgagcgcagcaggtccgctttatcgccgtcgctcaggctgggggtcagcggctggtctttctccggggagcggatgctgttcagcgtatagcgatagcgaaccgtcaccgcgggcgtctggctggtggtgctgaacgggcgtagcaggtagaggttatcttcgccaaactggccgttgtaccacagggcatacacctggccgttgattttgacccagtggttccactggttagccccgcggccattaatggaaaagagggcgccgggcaccccggcatcgaaatcatcaccattatcactgtcgctgccgttgacggcggcaaaatcatcatcacctcgcttgagcaccccggtgtagctgaagagcccggtgccgcccacgtagctgtcgatgatcaggtcgcgtttgccgtcgccgtcgaggtcgataagggtaaagctgactttgccgttttctgaatccgcgctaatcgaggagcgcagaaacgcctgccactcatcatcgctgatatccggggacggtttactggtcgtgatcagcgtatcgtcggcgtaagtgagcgtgaagtcggtaatatggccggttaacggaaactgctcggcgatcttattcagcgacaattctggatcgcttttttgcgctttcaacactgtgttatacaacgtgcgcagagccaggttatccgcctctttctgctgcctggggatcacctggctgacaaaggtcggcagcatccaggtgccacccggggtgatttcccgacacataccggtgctgtacttcaggctgggggtaaaggttttaccatcccaaacgcgcgtctcgccggtgacgcagtcggccatgccccgttctttgtgcaaaaagacgatagcgccgtcggcgtagctggaggcctcggtagtgagcagccgcggtttgctcaactgggcgttatcgaccagccacagagcgtaaccgtcgttatagggcgctcgccagcagagcgcctgcgccagagaatgggttttatccagcgcggtcagcgtgatctggcgatctgccgccggaatggcctgattctgccagtcgtcgcagcgctggttcagcagcggcgtcaggatgggcagcagtttctggcgctgaagcatactcaacggcactggctgcgcgttatggagaaccggggcggcgataatttccggggcgggagtggctggcaaaatggcatcgtcgccggcatcgcctttatccagcagcgcatcggcggtgccggtgcgtcgctgaaacgcatccattttacccagcacctcgcggctgccggcgctggaaagcggcaggtgctggccgttaagggtgaattcgattttgcgctgattcgttaacgcctgtagcagggcggtggtctgatcgctgtcgaggcgaaagtggctgtcgtcgagagcgtccagcgcgccaaaatcccggtcgtcgatcagcaggctggcggtggagtcggcggggatatcgtgctcgatttgcgcaaaggttaccgtggcggtgaggtgctgttcgctgcccgcgttgcgggtcaacagcacgctgacctcacccatgcggacgccgtaacccgccgcccggcaggcgccggtattatcgcaggcgagctcccagtctttttgtgcaaaggaaaaaccttgcaggggagccgccagcaggggcgtagagcagaggcccagccaggcagcccagaagaacgcgcgcatatcaatccctgtcagcaatcagtgagggggaaattataggcgcgacgtggcggttaggatatcagaatcaggtcaaggcgccgcccatacggcactgggcgaagcgtagaatatcttcagccagccgccgggcggtatccacatccgtctggctacgtttgaccagcagacggctcagacagccctcgacaatcagctccatctgcttggcgaccatttccgggtcatccacctccagctgagtcagcagctcgtgagtgtaggccagcgaagcctgcttctgctgttccgccagctggtgaatggggtgctgaggatccgggtagaaggtgcaggcggcgataaacaggcagcccgggtaccgctggttgcttacgcaggtggtgagtgcggcatagcgtgccagcagcttttgctctgcgcttaaggtctcgtccagcaggagctgacgacgccaggcatccacctgctggctcagatagcgaagcgcgtcgtacagcagcgcttcgcggtcaggccagaagcgtttcaggtcgctcgtcgggcaggacacgcgctcagcgaccatctccagcgacgtgttggcgataccttcaatttcaagaatcttaatggcttctgccaggacgtcttcacgtagcacggtgttctcctccatctttcctcctaaagtgtcgctcacgcttgccaatcgcgcaaatgggcgctgaatgccgcggcatccataaagccggtgactcgccgctcagactgttcctgaccctcagcgttaaagaacaggatcgtcggcagacccagcacctgcaggtgtttcagcagcgcgacgtcttgcgggctgttcttcgtcacatcaacctgtaataacacggtgcctttcagcgcctgctgcacgtcaggtgaactaaaggtgtatttttcaaactctttgcaggccacgcaccagtcggcgtaaagatcgagcatcaccggttgacctttcgcctgcgccagcgcctggtcaagctcggccaccgagctgacgcgggtgaaagccaggtgcgcctgctgctcgaccgccggggcgccaaacgcccagtcctgcagaggccgcgcgctgaccagcgcggcggcaagcagaatgatctgtaccagccgcatccacggccgggtagcgcccagcgaggtgataaacgcccagctgaagaaggcgacaccgagcattgaccacagccgtaacccccactggtcgccgagtatgcgttccagcaggaagacgggcagggcaaggatcacaaacccgaaggcggttttcacatggctcatccacgggccgcttttcggcaacaggcgattgccaaacacggtcataaggatcaacggcagacccatgcccagcgcgtaaaggtacagcgtgccgccgcccagccacagattaccgctctgggcgatatacaacagaatggcgcttagcggcgcggtggtgcagggggagcagatcagcccggcaatagcgcccatcgcaaagaccccgccgggcgagccgccctggcgcttattgctgagcagcgtcagccgggtctgcagcgacgacggcagctgcagcgtgaacaggccgaacatggagagcgccagcagtataaacaccgccgacaggccgaccaggacatacgggtgctgcagggccgcctggaactgcagcccggcggcggctaccaccagccccagcgcggtataggtcagggccatcccctggacgtaaataaaggccagcagcagagcgcgcgcggtggaaagccgctgttttccgcccagcacgatgcccgaaatcagcgggtacatcggcagcacgcagggggtgaaggcgataccaatacctatcagcagcgcccacagcgccgtaaagggcaggcgggcaggcgtgtctgcaggcggcactgcggcaggcgcaggtgatgtggcgagctccggggccggtcgcggctcaaccggcagcggcgggttgaacgccggacggctgctcgtcgacggcatgggctcgatggcggttgcctggccgtcgtttgaggccgcccgcacggcgctcagcgggatcactttagtctccggcggataacagaatccggcatcggcgcagccctgccaggtgacggtgagagtagcctctttgtccgcctccttcaccgtcaccggcacggtcaggcgttggcgaaagatctcgcttttgccgtaaaactcatcttcatgccactctcccgccggcagcgccggttcgtcgatcgtcgccccggcggcgctgaaggtaaactgttgacgataaagataataaccatccttgatttgccagctcaggttgacgtcatgctgttgctgctgaaagtcaaaggcgaaagcttgatcagcaggcacgaagttcgagcgccccggcgcgtcgaataacccggcggtggctgatgtgctgcacagcagcaggatcagcgtaatgatgcggtaagccatgagaggtaatcgttgtctccatgcgtgacgggtagaaccagcagttctggggtttgatacgggtggtgtgacttcaggcaatccagcagcgcctgctgatgggcaaggtcagttttgagtagcatctgcacttcatactcctgctcgagtttcccttcccagtaatacagagaggtggctcccggcagcagcgtagcgcaggctgccaccttttccgccagcgcttttgccgccagatcctgggcggtcgcttcgtccggcgcggtacagagcacaacaacagcatcaggcgtagtcatcatgaacctcgtatcagcgaaaagaggcactataacacgcaagatgcggggatattagcgtaacgagcggggaaagtgagggcaacggaaggcgggcccgtagtgggcccgccgccagcggtatttacagcataatcccgccaaagataaagccgaggatcacgcacagcgtgatagcgataacgccggggatcaggaaggcgtggttaaagacatatttaccaatgcgggttgagccggtgtcgtccatctctaccgccgccagcagggttgggtaggtcggcagaacgaacagcgccgagaccgcggcaaacgaggcgatagccgtcagcgggctgacgcccagcagcagcgcggcaggcatcaacgccttggtggtggctgcctgcgagtagagcagcgtggcggcgaaaaacagtaccaccgccagcagccatgggtaattatgcagcagatcgccggccacggcctggatgtcgctgatatgcgctttaacgaaggtatctcccagccaggcgacgccgaggacgcagacgcaggcgctcatcccggacttaaaggtgctggcgttgagcacttcgccggtgtcgattttacaggtgatgctaatcagggtggcgatggtcagcataaataccacgatcgcctcgttacgcggcagcaccgggttcttaatcaggccgacggtatcgctgatggccgtggcgtagaacatcaccgccacgatgccgatcaaaaacagcagaacggaacgtttggcgtgcggctgcagctcaaatacctggctgccgcgcagtctgacttcccccttggccagccgctcctggtaaaccggatcgtctttcagttcgcagccgaggaagttgcagacgatagcggtgagcatcaccgccagcagcgtgaccggaatacagatggccagcagcgtcaaatagctaacgcccagcggttcaaggatacctgcgaaaaagaccactgcggcggaaatgggcgaggcggtgatcgctatctgggaggccaccaccgcaatcgacagtggacgagacggacgaatgccttgctctttggcaacttcggtgatcaccggcagcgtggagaaggcggtatggccggtgccagcgagcacggtcataaaccaggtcaccagcggggcaaggaaggtaatgtacttcgggtggcggcgcagcatccgttcggcgaggctgaccaggtaatccatcccgccggcgacctgcatggcggcgatagcggcaatcaccgccataatgatttcaataacgtcgaaggggatcgcacccggtttaatttgaaaaataagcgtcaggacaaggacgccaaggccaccggcaaagccgataccgatgccgccgagccgggcgccgagataaatcgccagcaggacaataaccagttctgcaccaaacatatatgccttccttgttttttaacaagttgatattgaattgttgtattttagtaaaaccaaaaagcaaaaaaggcatgtcatcgctgacatgcctttgaatgactaacctgaaagattactgttcgctttcatcggtataacgctttgctttataagcgggatgcatcaggttttgcgcagagaaaatatcatccaactccgccgccgtcagcagtccgcgctccagcaccacttcccgtacgctcttgccggtttcggcacagatcttgccgacgatatcgccattgtggtggccgataaacgggttgaggtaggtgacgatgccgatggagttgtagacgtagccttcacataccgctttattggcggtgatgccgttaacgcatttctccagcaggttgtagcaggcgttggtcaggatatgaatcgactcgaacatcgcctggccgatcaccggctccatcacgttcaactgcagctgaccggcttcggaggccatggtcacagtggtatcgttgccgataactttgaagcagacctggttgaccacctccggcaccaccgggttaaccttcgccggcatgattgaagagccagcctgcagctcaggcaggttgatttcgttgaggcccgcgcgcggaccggaagagagcaggcgcaggtcgttacagatcttggacagtttcaccgccaggcgtttcagcgaactgtgaaccataacgtacgccccgcagtccgaagtggcttcaatcagatcttccgccgggacgaccggtaagttgcttacttcagccagcttctgcaccgccagctgttgatagccgtccggggtgttgaggcgagtaccaatggcggtggcgccgaggttcacctccagcagcagctccgcagtgcgcaaaatgcttttggtctcttcattaagcagcacattgaaggcatggaactcctggccgagggtcatcggcaccgcgtcctgcagctgggtgcggcccattttgaggatgtcctggaactcctcggctttcgcctggaagccttcgcccagctgtttaatcgcatcgattaacttaaggatggaagcatacaccgcaatgcggaacccggtggggtaagcatcgttggtggactggcatttgttgacgtgatcgtttgggttcaggtactggtattcgcctttctggtggcccatcagctcaaggccaatgttcgccaggacttcgttggtgttcatgtttacggaggtaccggccccgccctggaagacatcgaccgggaactggtccatgcatttgccgttattcaggacttcgtcacaggcggcgataatcgcatttgccgcgcttttgggaatggtctgcagctccttgttcgccagcgcggcggctttcttcaccatgaccatgccgcgcacgaattctggtatgtcgctgattttgctgttgctaatgtagaagttttcaatcgctcgcagagtatgaacgccgtagtaagcgtccgcgggaacttccctggtgcccaacagatcttcttcgatacgaatgttgtttaacatgtgaaccttcttttcaagctgccaatgaattcaccaaacacacagaatatccagtattcagtatattttctggccgacgattatttccttaaccggcccggtgcccaagatcatatgctgatgatagcgaatatcagtaagcttgatcacttattacattgcgggtatgagaagatttattaatctgtgaaatgggtcaccgctttcttattcctgagaaaaataagcctttccgctgattgaaaagccgctcagcatccccatgttagtgggatgcgatcagcaaattgatgattacgggcgctgaacgcagcgcccgttgatgaaggagacgccggtgcgttggattccgtttattgccttttttctttacgtttacattgagatatcgatctttatccaggttgcgcacgtgctgggcgtctttatgaccctgatcctggtgatctttagctcggtggtagggatgtcgctggtgcgtaaccagggcttcaaaaacttcctgctgatgcagcagaagatggccgcaggcgagagcccggcggcggagatgatcaagagcgtatcgctgattatcgctggtttgctgctgttgctcccggggttctttaccgacttcctcggcctgctgctattgctgccgccggtgcaaaagcatttgacgatgaagctgatgccgcacctgcgcttcagccggatgccgggcggcggctttagcgccggaactggcggcggagagaccttcgaaggggaattccagcgcaaagatgagcagcgcgaccgtctggaccataaggacgatcgccgcgattaacattccccggcccggtcagcagatgcgaccgggccgctttctttgcaggcctacacgcttcccgtcgccagcttgcgcctgggtaaaaacagccacagccccgccagcatcaccagcgcgtacaggcttttccagccgaccatcgccagcagcagcagacagagaatgctacccaccaccgccaatagccgatagcgaccgcgcagcaaacgacaacccgccagcatgcacagcagatagatcatgatgaaaatgccattggcgtaaacgatcagcgcgtccagattgatatcgagcagatagatgccaagggtgctaactacgcaggatcccagcacggcgttgagggcgttgcgcgggatctgacgtggcgacagccttgcgaggtagctgtgtggcttatgctgcgcttgcgaccagaccaggcgggcaaagctttgaatatagatgttgaggctggcgaaacaggcgagatagccgatgacgcaggctacccacagcgcttcgacgccgaacagacggaccacgatattcggtaatgacgccgccgccgctatctcctcgccaaaggcgtggaagtgcagcaccagcacggtgcaggcccagtagaccgagccggcaagcagcaggcctatcatcagcgccctggggaaatcacgctcgggatgtttaaactccgaggcgagatgcgcgaaggcttccagaccgacaaagcaccagaacatcaccgacagcgccgaaaagagctgcccgcggtcaatctccgccggggccgggaaggggatctgcgccgggcttatcccgccgcgccaccagactacgacgatcagcgccacaatcagtacggcaaccaacgtctgcaggttagcgctggagctggcgccacgcgaaccgacccaccagacgatggccagggtgcccagctccgccagcagcagctgcgcatcatgccagccgaacagcgcctggccaaaaccggtggcgatgtgcagggcggcggggagtccgaccgggataaccgataaaaacagccagccggttacgctggccagacgtggcccaaaggccatatcgacaaagtgggccacgccgcccgcgctgggaaaatggcggcccagcagggcgaagacgatggcaatcgggaaaacaaggagaatgagcagcggccatgcccacaggctgttatcgccagcgaccagcgccgccagcgccgggacggcgaagacgccggtacccagcaatgaggtggaaagcaacccaactccctgtcccagccctaactcctgttttaaaccactcatgattcaatcctgcgccagtgaaaaaaaagagagtatcacaatcgcttttccttatgaccgattgcctgacatggccgctttttgtgcgccagcgcaaaggtaaaaattttttttaattttgcccttgaagccggaaatggccatccccatctctctctgcactagccggtaaaccgcgttcggcccggcgtcacccataactgataatgactttctcgaaggagagctatcaatgagtattcgtccgttacatgatcgtgtgatcgtcaaacgtaaagaagttgaaaccaaatctgcgggcggcatcgttctgaccggttctgcagcagctaagtcaactcgtggcgaaatcatcgctgtcggtaaaggccgcatcctggaaaacgggaccgtgcagccgctggacgttaaagttggtgacatcgtgattttcaacgatggctacggcgtgaagactgaaaagatcgacaacgaagaagtactgatcatgcccgaaagcgacatcctggcaattgttgaagcttaattcgcacgaccctgaacgaatttgaggaataaaagaaatggcagcaaaagacgtaaaattcggtaacgacgctcgtgtaaaaatgctgcgcggcgtaaacgtactggcagatgcagttaaagtgaccctgggcccgaaaggccgtaacgtggttctggacaaatccttcggcgcgccgaccatcaccaaagatggtgtttccgttgcacgtgaaatcgaactggaagacaagttcgaaaacatgggcgcgcagatggtgaaagaagttgcctctaaagcgaacgacgcggcaggcgacggtaccaccaccgcaaccgtactggctcaggctatcgtgaacgaaggcctgaaagctgttgctgcaggcatgaacccgatggatctgaaacgcggtatcgacaaagcggtactggctgcagtagaagagctgaaagcgctgtccgttccgtgctctgactccaaagctatcgctcaggtaggtaccatctccgctaactccgacgaaaccgtcggtaaactgatcgcggaagcgatggataaagttggtaaagaaggcgtgatcaccgttgaagacggtaccggtctggaagacgaactggacgtagttgaaggtatgcagttcgaccgcggctacctgtctccgtacttcatcaacaagccggacaccggtgccgttgagctggaaagcccgttcatcctgctggctgacaaaaaaatctccaacatccgcgaaatgctgccggttctggaagccgtagcgaaagctggcaaaccgctggtcatcatcgctgaagacgttgaaggcgaagcgctggcgaccctggtggttaacaccatgcgcggcatcgttaaagtggctgcggtgaaagcaccgggcttcggcgaccgtcgtaaagctatgctgcaggacatcgctactctgactggcggtaccgttatctctgaagagatcggtatggagctggaaaaagcgactctggaagacctgggccaggcgaaacgcgtggttatcaacaaagacaccaccaccatcatcgatggcgttggcgaagaatccgcaatccagggccgtgttgctcagatccgtaagcagatcgaagaagcgacctccgactacgatcgtgaaaaactgcaggaacgtgtcgctaaactggctggcggcgtagcagtaatcaaagtcggtgcggctaccgaagttgaaatgaaagagaaaaaagcacgcgtcgacgacgccctgcacgcaacccgtgctgcggttgaagaaggcgtggtggctggcggcggcgtagcgctggttcgcgttgcggcgaaactcgctggcctgaccggtcagaacgaagatcagaacgtcggtatcaaagttgcgctgcgcgcaatggaagcgccgctgcgtcagatcgtgtccaacgccggcgaagagccgtctgttgtggctaacaacgtgaaagctggcgacggtaactacggttacaacgcagcaactgaagaatacggcaacatgatcgacttcggtatcctggacccaaccaaagtcacccgttctgcactgcagtacgcggcttccgtggctggcctgatgattaccaccgagtgcatggtgaccgacctgccgaaaggcgacgcgcctgacttaggtgctgctggcggtatgggcggcatgggcggtatgggcggcatgatgtaatcgtgcgctctacggcataaaaaagcagaaacccctggccagcaatggctgggggtttttcttttggcgcgctttttagtataaggcttatacataaaaatcatttaagctgcatcagagcggcaagcacctctgtttcgggcgtgaactgacaagcgcgaccggggaggaaatgaacgcggctcatgccgacgcagtttgaaggatgacagatttacatccgggccagtgcgtccagctcatcgatcatggggaataacatgcaggtaaaatatttagcagggattgtcggcgcagccttactgttggcaggttgcagttccagcaatgaattaacctctgccggccagaatgtgcgcttcgtgcaggagaagccgggcgcagagtgtcagctgttagggaccgcgacgggtaaacagagcaactggctctccggccagaatggcgatgagggtggttccatgcgcggtgcggcaaacgccctgcgcaaccaggcggcagcgatgggcggcaacgtgatttacggcgtcagcagcccgacgcaaaacctgctgtcgagctttgtgcctaccgacagcgaaatgaacggccaggtttataagtgcccgaactgatgcgtgacgcctctctccgcgagcgcagagagaggcgtggtcgttagatgaggatcaggcgctaagctccgctttcttttcaaggtagaaggcgtgtaggggacgcaggcattcttccagactgagcattcttcccggctgggaagggatgatagtgctgaagatctggcatggcgccagctccgcgtgcatcgccttgagcttggggcttttctcgataatccgcgtcacaacgttgttttccagttccgacaaatgcggcgcgctggttttcaccaccgccccggagacaattttcttgccttcgtctgtctcgcagcagtacagcacgcccagataatgggaaaacaggtttagcttccagtcttcctggggatactgctggtaatcgatattgggctgagtggttaagtcgacggtatagcacattaaaaaatccatatttgaacttaaatactgaaccagttcctggtcgccgactgtttttaatgcttgttgaataccgataattaatgcttcgatttgcagatcgtcaatacataaagtactaatttgttcatcctgaaatacaagaattaacgttgactgtgtttcgccaggtttgagcgtaatggacatgattcgccgctcaggggatggttgctgtatttcagccgtctcaacctgaggaatattggcaacaagtgcctcattatacgtgataagctcatctttataggcctctccctggttttcaagccgctggaaaatcacagccattctgctctgcagtatcaggagcagatcagctagcaccggtgcctgaagatagtaaatctcgcaaaagccattttccttcttaactttcagcagcaacgctaaaaatcgctcttcaaaggtaattcctgcggtattaaaacctataaacgttccttgcatattcttctcctttattaagcagtagtcaccgacttcgattgtgagagatcgataacacgatcggcggatgcaatggtcgatggtcgatgcgcgacgataatgcgggtgatacttagcgctgaaatagactgattgataaccgactcatttctgaggtcaagatggctggtagcctcatccatgaataaaatactcggtttgcgatacagtgcgcgggcgatcaggatacgctgcttttgcccacctgaaatacccagcccaagttcgccgacaatggtttcgtatcccatagccatcttcataatttcatcatgaatgttgcaccgtctggcacactccatcacaaaatcaagatcggcgctatcatcgaagccacttatattatcaataagggagccggaaaagagacggtcttcctggagtacgcaggcgataccaagacgatagttattcaaaccaatctttttaatctccagattatccgccagtatttcgccggaatccggcgagagcagtccgcacataacttttaatagtgtggttttccctacgccagatgggccaattaacgcaactgattctccaggagcaacggttatgttcaaatttgtaaagatgggttgtgaaaaaggatcgtattgataactaagatttctcacttcaagttttacgccagtgttttccgtaaaaacacgccgcgatggaagttctttttctggttcactaaatgctatttctgatagacgttcgttgtgcagtgagagcatacgaagctgcatcaccaaatcaatgagattcgatgcacgttgagaaaactgaccccgataggcgttaaatgccataaacataccgagcgtcatctcattatcaattaccataatggcacccaaccacagtaccactacctgatcgattgaggtgataaaggtattaatgccaccaaacatcatatcgaatcgagtttgctttatacctgcattgctggcgtcaacgttaagattcagccaatgctgtgagcgacgttcttttaaattcagtgctttgatcgtagaaatgccataaagtgactccataaagtgggagttagcacgtgcgcctttgacgacctgttcttccgttacgcgacgataaaagctataggtagcaaagcgcataatcgcatagcaaatggtaaagccgatgacgacccagactaaccaaccaccatataaggtcagcatcaccaataaaccgattgtcattatcgagtcgatgatgccggtaacgatactattggtaaatattgagcgaatcgtatccaaagacgagaagcgagactgaatatcacctaaatgccttttctcaaaaaaggataatggcaaacttgtcagatgatcgaataacgtcgttttccattgaatatttgtcagggtatttaacgttaacgacgtccatgcacgtagcatgctaataaacgtgcggaatagggtaaaaaatatcaacccgatacagataacagacagtaagctttggtcgtgagccataatcacatggtcagtgactagctgtgtaccaatcggtaacaggagtccgatagcttctaccactacagagtaagcaaagatcttaatcagtgctgattttaaaccaacaattttatgcattaaatccagcaatcgtaatcgggattttgcttcttcttgctggaagttatgatcgggccaaagttcaagcgctacaccggtaaaattgtttgacatctcattgatgccaatgattcttttacccaacgccggatcgtgaataacaaatgcgtttttccttacctttgtaagaacaacgtagtggttcatcccccagtggatgatgcaggggagtttaagctgctttatttcatcaaggtcaagagctaacgcccggctttttaagccggcatgctctgcagttttgcttagagacattagtgaggagccctgggaggggctaccaaaccgctgacggaaattaaacagatcgatattcaacccataaaaaccacagaccattgccagacaggcaattccacattctgatgattctgactgaagaataacgggcgttttgttaacaagagaaaaatttaactttgcaacaacagttttgaaaagttcgttagtcatggatcggcccagtaatgctttgagttatcttatacacaggggtaaacatccacatatagagcggacgctcttccaggaatacaacagcttgagccttgaggccatttgaaagcgaaagcgttttaccattatattcaaaggttttgttttcaattttcacaatggtcttatagagcgccagttcctgctggtttgtgccgttcgtaacattggtatactcagacatttcttgtcgagatgtgggaacagaagatattgaaagtatttttcccgggaattgaccaaatttatctgatgggaatgcagcataacgaatgttaatttcatccccaggttttacataaggtatactattgttaggtaaccataaaataagataatactctatatcaccggtaggttttatctgtgctagactgctgcctttatcaaccatttggcctttagtgacggtcaatgattcaatacggccttcagtcgttgctttaataataatgttaccgtttgcgtttgattcaaccagttgatttttataatcattaatctggttttcttgtgacgagatttgattgtcaaaatcagctatttttgtaattttatcactattgagctgagtgacctgcgattccagttgcattttctgactcaccagagactggtaagtgctttgttgttgaaaatacaaagagtgttgatagttatattggtctttggtaatcagtccgtcacttaaatacttatcatagctggatagattatcatgcattttctttaatccagcctgggcgttagccaacatgcgattagtttcttttaacgaatcattgattgtttttaactgcttctctaaagaaatggttgtttcttctttattatgattcagttttgaaatgatatcttcagcatttgcgatcttttcattaatgacctctatttgtaccgcactaacattacccgttgtggtgttccgggaaatgtcgatctcatataacggctggcctttggtcacaatatcgccgacttttacatattgggagataacaaagccttgctgcggggcataaacgttgacagagtgaggtagagtaatgacctctccctgaacgtcgattctctgggtaaaggagcaaaatactgtggtggctatcaggatcgcaagaaaagcaaaagagagtaatgcaacaagccatgctggaagccctgcgagcagcagtgcctttcctttccagtgatgctttttatactcaatcgcttccttgcgatagattttttttaacatagttatcgcttaaattataaaatgaaaaggcccgatacgtcaggccttaattactaatgaatgcttgtcaacaaactgttgagctaatcattggcgcgtaaacttagttgctccagaagttcagggtgccgtcataaatagcatccattacgccctgagcataatccagagtcatatcccagccaacgatacccgctgcaataccaaagcaaacgccaccgagaataaccccggcgatcatccctacaccctggccgattgagccgataccgaagataccgccacttacgccaccccaacgtccggcgtacgctgtaccaaaaatagcgcccagagaggcgcccagtgcgatagcgccaacttcttttgcggcccaggtgacgatatcggtaagagtatcggtcagcgcaccgccagaaatttcttccatttcaaatacagttaattggtgcatgattagtcctttaactaaaattaaaattatatattcattccagaccagaatttggtccgcagaaaagatagtcgttgctgtagtatgaatcaactcaactaaatatgaattgttgatgaaattagaggttaatagtgaatcaaatctaaactatttataggttcataaaacagtaactaattcagcaggtggtggcacgcagctattatcgatgtgctgcagatatattgatttattcttgcattcatatatgacatttttttggttgttgacataaaaatacaaaaggtggatatcattatccaccttttgtaggggtatggaggttatacttttactcttcctgtatgacaacttcaagcatagcttttacatgaccggaagagacttcagcgctattgtcactcatgcgataatagtcggcggtgaaggtaaagttttgtgatgcctgtgccttggcgaagctataagtttcggcgtcgtaaaatattataggcttgttgtcaattttgaagataacgccaacgttatttgcggcttcggttccagttatcatgttatcgatgatcccatccccggcagaactggtgccattaacagggttaaaccagtagtaaagcttgttgccaactgaaccttgtgggcaagtcacatccattttgatagttttttgtgatggagttgtacctcctcgagaaatggacattaatgtgtttttttcaattttattcagggtgatttggctaggccctgatactgaaatatcgcaagaggtatctttatatgaaatagtcttgaacttcagggttgctgttaacaaaaggcggtcagctgcccttgggttggtgcttaagttacctgctgagaatttaaataccgggtttgtactggtgccggatgtatcgatgacctgctttgttttaattaaccataccgtcataaatttataatcttcattcgattctaaaataggtacgattgtagattgagcaacagcaggattaatagaaccatttttgctgctcagaagatctgaaaactgaaagccaattccatctatgccggtttcatagactggtttgccccttatacccgtgacgccggtaacttccggtgctgttgattcaacaatatactggtctcccattattttgctgcactcaaatgttttataatgtccggtaccgacttttttagtatagaggactgtacccaccggaattgttgggtctgttgcgattttaggacttatgttaaacattgcttgtccagcggaaccagaataatcgcatttggcaattacctcgctacaacagcatagtagggataaaaaaagaagtatttttctcattctttattgttccttggtcaatattagcgacaaaccgtttcgatttgactgatgccagacgctttgccttccctggctggtaaagtaaaggaagcattgcactgctgcgcggcgcttttgccccactggacgttaaggatcccggtctgctgcaacccggacatatagaccataccggcgtcgctgacgatgcttggctgcgatttgctgtcgccggcgagtagaaccatcgcgccataaggcacgtcctgaccgctggcggttttcagatgcacaaaggccctctggccgatattgccgtcataattagcacgcacgatggcaccacgggtcggcacgacgctttgcgtagtttctggaagctccatatcttcacccagtgaagtgctgtcaagggtgatgtcggtacgacggtaaggtgtaacgtacgggacgatagcgtaaccgcgatagtcggtggagatggtgttatcgttggtcaacttgacgttatccaggcccggcgctttaaccagcacggcggcgtcagtgatgtcctggccaagtgtaatgccatcggcatgagcgacgatgctgccgttggcgccgtagtcaatacgttggctgttattgtcatagctatagccggcattaaggctgccgcgggcaccgttataggtcccacgcatatcgcctctgtaatattcccggttgctgtacccttgctgcaggctccattccaggctgtcgttatctagcccgacgccaccaatggagaccgactgatcggtagatcccggattgctgttggttaattgatagctggtataggtacccggcagccagttgctcagcggtagcgtcaccgtcagggtgatgcgccgatcgtcctgggcatccttacctgagttatttccgctccaggtgtagcggttatagctgtagcccagatagtagttcacattacggaaaccgccgttgtaacctacgctaattgacttgttggttcgcttatcgtcccagtaatcttcaatcaacccgcttatcgacaggctaccgaggcctttacccaggctttggttaaccgtcaggttggtgcgattgcgcagtgagcgagaggtataattaccgtcattagagtagctatccagcacctccgagagggtattaaagccgcgggtggaatagcggtagcccgcgatggtgacattggtgccagtttcgacaatgtttttaccataacggacccgccaggactgtcctgaggtcttttcatcgtctttctttttcgaccatgcctgggtgacgtctgccgaggcggcgccaagctcgcccaggttatagccgaggcccgtcgacagcgcctggtagcgcgaggccgcctgcataccgccataaagcgtcaggctgctggagacgccataggtcgcggtggcctgagtaaatggcgtttcatcgactccaccatcgtaaggacgatatttaccggaagtaatctcatactccagttgattttcacgcaccatgaccggtagggtggcgaacggcacaacaaattcttgcttggatccgtcggactcttccacgctgacgtaaaggtcgccgctaccgccgctcgggtacatatcggtgatttcaaatgccccgggtgccacgtaggtctggtaaacctggtagccgttctgtttaatgacgacgcgggcgttggttttggcgataccgcgaataatcggcgcatagccgcgcatactttccggcaacatcgtggtatcggtggccagctgaataccggtaaacggcacgctgtcgaagatggttgagagcgatgaactttcgcccatcaccaggttactgttgatcgagcgaatacttcgctgcatatagagataggcggagtcccagtccccggcatcgctattgtttttattccatgtgctgaggttgcggatacgccatgggccaacgttgaggccagactgcaggttcaagctgtagtattcatcattggcctgcatgtcgttcgagccgctgaactggtagttcaccagcagggcgttgatgccatcatcaaactgatccggtgggatatatccctgcgcggtggtggataaggccgcctgcggaatagaaatatttaagcgctgggcggtaaagtcaaaatccgctttggtgtccggaatgacagaaaagtttgcacagccgttttgatcctcggctaactctggaaaggattttatccttacgccatattccgcgagagcttttagactcaggcagggaaccagagcgggttcgcggttatcgctgctggcgcgattgttggcgacaaactttatcgtcctggtatccaggtagcggccattaaacatgatatcgacccgataatcccccggcgcctgcgcgttctgggtctgaaatacggataagtcaggagtggttgatggatcgctaccattcaatgagctaatgaatgagggatcgaaaaagtcacgtgcttgcgctttattattcaaaccagaaagcaatgccggaagcattgcaaagaagatggtggatagtttgaataatccattattcttatttggcatagacacatccctataatgataaaataaatttcttattacagcgatgaggagtagagcgacccagctccgccataatcattgacaactttccaggtaatgctggaggcattaatattttcttttaacgtcacttcttttgtcgtcatcggggcgaccgagttgacttccggcttcacttctttgctgccaatctggatgctatggaaatagaagaaaaagggcgttggatttttgatcgtcagcttagtgccagactttcgccattcgagctttttcgcttccgtattaggggagaggtcgaaaagtgctttaggacgatagaccagacgcatacggtgacggactgctagttgaatggtgttgttattcgctttggcatcatctgccggaggaatcgccatcacgttaaaatagtacatggattcccggtcggtcggcgcattaacgtttccgttagaaaacagacgaaccgtattctgttgtttcccttcaaggcggaacagcggcggcgtggccataaaagagggcgcttttcctgccggcgcttcaacccaggatttaatcagatagggaatatcatctttattttctatttgcgccgtgatttcacgtgcgccttctttatacagatagcgggtggatcccactacaataccggcatgggcaatactgctgaggagtaatgcacaggaagcggtgaaagttaataaagtcctgaacatgttttttctctgaatgcaaaaaagggcccgccgtgaagcggggccctttggggaaaaattagatggtgtaatcgatagtaaaggtcgcaacacctttaaccgggccttcggtgaccggagtagcagagttcacttttacataaccagtggtgtacttcagctgagtaccggtagtagcagagtagctttcggtcatggtgtcagaaccgtcgaaggctacgcgatgtgaatcgctgagacgctggataccgataccgataccggtagcgccgccagctgcggtgttgtccaggatggttttatcgctggaggtgacaccggcaacgtttacagtcaggccggtaaccgggttagcgctgccctgtgcgcagtcagtaactttaaaaccgaagtcctgagttttgaacagagtacctgcagcttcagcatttgcttccgcagtggtcacagtgatcagctgaacgataccgttgttcagggtaccagtcggagtcacgacgcaagagttagctgcatcagagacttcacccaggacagttacctgagcggtgttggttgccattgcctgagcactcagcactgcagatgcagcgaccattacagctacgattgtctttttcatttaattaatccatatatagatacttagtcctgtgtagagttgataacagttatcaagggaatggagtatgcattcgcattgatattgaaaataagcgccagcattcctttatatagtgctgagaccaatcatcctgttgaacaacgctaccatatcgcttgccatagcgaaccatggagaagcgggagtaatttaaaagtctggtgcaaaaaatgcttgtgaattgttgatgaagcacctgtgaatttaatgctgccccccctctctgatgagatgtggattccagttgagattaatttaatctgaaaatctgaccattaagcaagttagctatcgcttgtttttttatctgcggtatcctgtgggctgaacttcaatgtgaaatgtacctgttttcatctgaaacaagaatgttcacataatcgtttggttgaaatcatttgattttattatggataatagggttacgtggggcaaggatatggatgacgcagtattatttaatgggtgtataattaatcaggagattatatttaatgccaatatgaatgagctgcggccgcttgccggggacggggagtgcatcagcctcaatgcgccaaccgccagatgcttgctgctgcttttgcagaattgcgacaaagtcatttcacgggatgagttcctggcggctgtatgggaaacacggggggtggtcgtttcgcaaaatacgttctatcaaaatatctctttgctgcgaaaatcgctggtaaaagctgggctatctgaggatatcattatcaccgtccggcaaaaaggctttagcgtcgctccgaatacattggtcattcctctctctgatgaagagtgcaagaatatgaatcgggtgacattaacgcattatcagaataataaagttgtcgactttatttctgaagaaaaggaaaagcctgacactcatttaaatcttccactaatagaaaacttatcaaagcatggcagtgatttgatggcaaataaaccggaagaaggtgaaaaagcatctgagcggttgcatgttacttttaaaatacccgtatggttaatcgcgctaattgtcgtgatgattgtaattaatattattgtgttggtcgtgctaaaccggtagctcgtcacagccaggggttatagcgcggtgcgatagtcatttgctggtcaccttaacacccgtctgtcgaaatcttcctatccgaaggtctgccagaacgtcctggcagaccttcagtttattaacgctgcttcagccctaaatccagcggcgtcttgctgggttccccgccaatctcgcgcgccagcttcggcaccatatagccagagatgagggtcaatagttcgcgcatgatttcacgggcttcatcatcgctgaccatgaagtgcgccgctccctgcacccgatccagcacgtgcaggtagtagggcattaccccggcgtcgaacagcgcattactgaggtcggccagggtttgcgcgttgtcgttcaccccgcgcagcagcacgctctggttgagcaacgtgacgcccgcctgacgcagcatggccatcgccgcgcgaaactcaccgtcaatttcattggcgtgattgacgtggttaaccaggattacctgcagcgacgaacgctggaagcgactggccagcgtctcggtgatgcgcgccgggatcacaatcggcaggcggctgtgaatacgcagacgcttaacgtgcggaatagcttccagctgggtcattagccagtcaagctcatggtcctttgccattagcgggtcgccgccggagaagatgatttcatcaagctgcggatgcgccgcgatgtagtccatcgccgtttgccagttgcgcctggtgccctgattttcggcataagggaagtggcggcggaaacaataacggcaattgactgcacaaccgcctttcaccagcagcagtgcccggttgcgatatttgtgcaacagaccgggcaccacgctgtgctgttcttccagcggatcggtggagtagccgggggcgacgataaactcttcctcggcggtaagtacctgacgaagcagcggatcgttagggttgcctttctccatgcgggcgataaacgcgcgcgggacgcgcagcgggaacaggcgtctggcctcgcgtccggccagcagtttttcatcagcgtctacatttaaaagacgcagcagttcatcaggactggtcacaacattggcaagttgcgttatccaatcttctctggatggggtatttagggttacaatatgcgccattttgtggcttagctaccagttaaacaatttcagagggccttatggcgacttactatagcaacgattttcgtgctggtcttaaaatcatgttagatggcgaaccttatgcggtagaagccagcgaattcgttaaaccaggtaaaggccaggcgtttgcgcgcgttaagctgcgccgtctgctgaccggtacccgcgttgagaaaaccttcaaatctaccgattccgcagaaggcgcggacgttgtcgatatgaacctgacttacctgtacaacgacggtgagttctggcacttcatgaacaacgaaaccttcgagcagctgtctgctgacgcgaaagcgatcggtgataacgctaaatggctgctggatcaggctgagtgcatcgtgaccctgtggaacggccagccgatcgcggtcaccccgccgaacttcgttgagctggaaatcattgaaaccgatccaggcctgaaaggcgacaccgcgggtaccggcggtaaaccggcgaccctgtctactggcgcggtggttaaagttccgctgttcgttcagatcggcgaagtgatcaaagtggatactcgctctggcgaatatgtatcccgcgtgaagtaatttcgcgtcatgatgaccggcgtagcctccgtgctgcgccgctcttttcgtacaggcacaacgagcacgatacatgaagcgcagcgttaaactcctggtgttactctttctgagcagcgcactgttggctggctgcaataccgcccgcggtgtgggtgaagatattcagggcctgggccacgctatctctcacgctgtgagctgaatttccctgccgtttcgttaatggcgcttgcctcccggtatgtcagcctcctccacgcatactccttttctcttaaaaatcgcaaagatcccttcatctttggacggtttgtctatgcttatagggcatgaaaacaaaactgacactaaggatgacattatggtgaaaaaaacgattgcagcgttctttacggttttggtcctctcttcagcactgaccgcttgtaacaccacgcgcggtgtcggtgaggatatttcagacggcggcaacgcaatctctggcgcggcaaccaaagctcagcaataaacgccgtcaacggtacggtttagcgccgtaccgttcttcacttctctcattccgttggatatactcaccacgacttttcatccaccttacgggacgacccgtaagcgtttctcatccggggacggccccagcaaaggagccttatgtcctggatagtcttgtttatcgctggtctgctggaagtggtgtgggccgtcggcctgaaatatacccatggctttagccgcctggttcccagcgttatcaccatcgtggcgatggtggccagcatggcgctgctctcatgggcgatgaaaaccctaccggtaggtaccgcctacgccgtctggaccgggatcggcgccgtgggcgccgccgtgaccggtattgtgctgttaggggaatccgccagcgccatgcgtatcgccagccttgtctgtatcgtgattggcatcattggcctgaagatcagcgcgcactaatcatagcgctgattgacccagaccagtttgccgacatcaaagccctgtcgggtggcaatgtccagcatctgctgcctgacctccggggcgatggtcggcgcccgggccagcagccagagatagtcgcgatcggggccgcagaccagcgcgtaacgatactccttatccagagcaatgacgttatagctgccgtagaaagggccgaagaaggaaatcttcagcgcggcgcggctgggctccccggtaaagtacgctaccccgtccgttttctgccacatgccgcggtcggggttataacctttattcaccacatccagaccgccgtcatcacgtgggtgccaggcgatcgtgaccttttccagaccgctttcaaaagggtggtcaaagcgggcgatttcataccaggtacccagatagcgctgaacgtcgaagggactgaccacggtgacgcccggcggcggggcgggcgtgctgcaggcgacagacaggaacgagacggcaatcgcggtgattatcggcaggatacgcatggcatgctccttgctggcttttaagctaagtgtagagtccagcagggaaaaggcggcaagatttttctatgaagcgagcccggtagcagaaatgcgaccgggctcttgcaggatcagataaacagtacgccaacgagggtgatgacgctgaggattgccgccaggccgtagaagacccatttaccgtttggcacatggattttcagatcgtgcatggcgtggtgaatacgatgcaacccacaccacagcggcaggacaatcatcagaaagatgaatgcgcggccgataaagctttgggcaaaggccagcacacgctcatagctaaaggcgtcggccggggcgagccccagcggcagcaggatgccgaccagcagcaccatcaccggcgcgacgatcgcgccccacatgccgcctgcgccaaacagcccccagaatacgggttcatcggaacgtttcggattgggattaatcatctcagcctccttaccagaacagggcgacaaacaggatcaccacggtgaccaccgccgtcaccacccagagccctttaatgaccggctctggccccattttttcgcctttgatgatgacgttggcggctttcggcgccagctcaaaccaggttttggtgtgcagcagcgctgccgccagagtaatcaggttgaggatcaccaccaccgggttttgcaggaatccgatatatcccgcccagctatcggcgccgtgcttgagggcaaacagcccataaatcagcacaatgctaaaccataccgtcggtaccgccgtgccttcccgtaccatgtagaagcgataaaacggcagctttttccaccaggtggaggtcattggtcgcacgtagggtttgcgtttcgtcgtcataatgcactccttagcgtggtttcagggtggcgataagaaagtctttcgagctttccaccttgccctgctggatcgcggccgccgggtcgacgtgcttcggacacacttccgagcagtagcccacgaaagtgcaggtccagacgccattctggccgttaagctgcgccatgcgttcctttttaccgtggtcgcggctgtcttcgttatagcggtgggctagggtgatcgccgccgggccgataaattccgggttcaggccgaactgtggacaggcggcatagcacagcccgcagttgatgcagccggaaaactgatggtatttcgccatctgggccggggtctgcttgtttggcccctggtcaggcgtgcggttattgccgatgatatacggcttaatggcttccaggctttcgataaagtgggtcatgtccaccaccagatcgcgctcgatcgggaagttggccaatgcctccaccttgatgcctttggtgtaatcgcgcaggaaggttttgcaggccagcttcggcaccttgttgaccatcatgccgcaggaaccgcagattgccattcggcaggaccagcggtagctcaggtctggcgccaggttgtctttgatgtagcccagcgcgtccagcagcgaggtctgttcatcgtaaggcacgtcatagaatgcgctgtgcggtgcggtgtcgacctccggattgtagcgcaccacttcgactttcaggtttttcatctcagccatgggtggtctccttcttctcagccgcgtccgcttctgcgccatagacacgttttgccggcggcagcgtggtgatcttcacatcgccatattccagacgggtagtgccatcggcctcgcggaaggcgagagtgtgcttgaggaagttgacgtcgtcgcgttcggtacagccttcatccaaacgctggtgcgccccgcgcgattctttacgggcgatggccgagtgcgccatacattcggcaacgtttaaaccgtgccccagctcaatggtgtaaagcagatcggtattgaacacgctggagttatcagtaatgcgcacgcgcttaaagcgttcctgcagttcagccagcttgtcgatcgttttctgcatcagctccggcgtgcggtagatgccgcagccttcctccatcgacagccccatttcatcgcgaattttcgcccagttttcgttaccttcctggttgacgagatctttcaggcgctgctccacatcggccgcctgcgcatcgagggcggcgccgtttgcctcgcccgcctgagcggcgcgctgcatggcctgctccccggccaggcggccgaagaccaccagctcggccagcgagttggagcccagacggttggcgccatgtaagccaacggacgagcattcgcccacggcaaacagccctttgattcgggtttcgcactgccgatcggtttcaataccgcccatggtgtagtgcgcggtcgggcgcaccgggatcggctctttcaccggatcgacgccgacgtaggctttcgccagttcacagataaacggcagacgctccagcagttttttctcgccgaggtggcggagatcgaggtagaccacgtcgccgcgcggcgtcgggatggtgttccctttccgccactcgtgccagaaggcctgggacactttgtcgcgtgggcccagctccatatatttattcttcggttcgccgagcggagtttccgggcccatgccgtaatcctgcagatagcggtagccgtttttgttgaccagaatcccgccttcgccgcggcagccttcggtcatcaggatcccggagcccggcaggccggtcgggtgatactgaacgaattccatgtcgcgcagcggcacgccatggctcagagccatccccatcccgtcaccggtgacgatgccgccgttggtgttgtagcggtagacgcgcccggcgccgccggtagccagcaccacggcgttagcgcggatctgcaccagggtgccttccatcatattcatcgccaccaggccgcgggcctgcccgtcatcgaccagcaggtcaaggacgaaatgttcgtcaaagcgctgaatttggggaaactgaagggaggtctggaagagggtatgcagcatgtggaagccggttttgtcggcggcaaaccaggtgcgttcgattttcatgccaccgaagcgccggacgttgacgctgccgtcggggcggcggctccatgggcatccccactgctccagctgggtcatttccgtcgggcagtgatgaacaaaatagtcgacgacatcctgctcgcacagccagtcgcctcccgcgacggtgtcgtgaaaatggtactcaaagctatcgtgatcctgggcaacggctgcggatcccccttctgcagcgaccgtatggctgcgcatcggatagactttagaaatcagggcgattttagcgttggggttggcctgagcggcggcgatagcggcacgaaggcctgccccgccggcgccaattacggcgagatcggcttgaaaagtttgcacgacattcctccagttttagtgtatttcgccgccgggctggcgaaaaagtatcactgctcctttataggtacaggagtatagccttagggtcagtatggaaaattgacgtgttcgatttttttatcgatatgtgcggttatttatcagtggtatttatgcgtcagggttaacgatagattaatggcatgtagtctgccggagattgcacaaaatttgtttcactcgccggttgcgagtagacttcgtgcccttaatttgcaatcggagaaagtaccatgagcgagacggcaacctggcagccgagcgcacccattcccaatctgttgaagcgcgcggcggtgatggcggaaatccgccgtttctttaccgatcgcggcgtgctggaggtggagacgccttgcatgagtcaggcgacggtaacggatattcatttgttcccgttcgaaacccgtttcgtcggcccgggccattctcaggggcttaacctgtacctgatgaccagtccggaataccacatgaagcgcctgctggcggcgggttgcggcccggtcttccagctgtgccgcagcttccgtaatgaagagatggggcgtcatcacaatccggaattcaccatgctggagtggtatcgtccatgctatgacatgtatcgcctgatcaatgaggtggacgatctgctgcagcaggtgctggagtgccaaccggcggaaagtctctcctatcagcaggcgtttcagcgccatctggaaattgacccgctctctgccgataaagcacagctgcgtgaagtcgcagcgaagctggatctgagcaatatcgccgatactgaagaagatcgcgataccctgctgcagctgctgttcaccatgggcgtggagccgcacatcggcaaagatcgaccaacgttcatttatcatttcccggcgactcaggcctctttagcgcagatcagcccggaagatcatcgggtcgctgagcgctttgaggtctattacaaaggtattgagctggcgaacggtttccacgagctgaccgacgcccatgaacagcgcctgcggtttgagcaggataaccgcaaacgcgccgcgcgcggccttccgcagcagcccatcgataacaacctgctggcggcgctggaggcgggtttgccggactgctccggcgtggcgctgggcgttgaccgcgtggtaatgctggcgctgggcgctgaaagcatcggcgaagtgatcgcctttacggtagaccgcgcctgatcgctttttcacctccctccgccggcgggtgggggaggtgaaagacgactctgaacctgacaccctcgccccggctttagcccgaatacccacaatttccctccgtgattttgctactatccgcgctctttttatgaggccaggcgtcgctcgtcgggcgatgcccacgtttggatagatttatgcatcaacaactcaagaagatgagcctgatcgggctgattctgatgatcttcacctcggtgtttggctttgccaacagcccatcggcgttttatctgatgggctatagcgcgatgccgttttaccttttttccgccctctttttctttatcccgttcgcgctgatgatggcggagatgggctcagcttatcgtcgcgaagagggcgggatctattcctggatgaaccacagcgtcgggccgcgctttgccttcattggtacctttatgtggtttgcctcgtacgtagtgtggatggtgagtaccgccgctaagatctgggtcccgctctctacttttttgtttggcgcggacaaaacccagacctgggcgctgggtagcctgacgccgacgcagacggtcggtattctggcggcctgctggatggtcgtggtgacctttattgccgtcaaagggatcaataaaatcgctaaaattaccgccgtcggcggtatcgcggtgatggggcttaacctggtgctgctgctggtgagcggggcgatccttctgcttaacggcggtcatttcgcccagccgttaaacttcaccctttcgcctaatcccgggtatcagtcgggcatggcgatgctgtcgtttgtggtatttgccatctttgcctatggcggaattgaggcggttggcggcttagtggataagaccgataagccggaaaagaactttgccaaaggtattatcatcgcggcgatcgttatctcgatcggttactcgctggcgattgtgctgtggggcgtgagcgccaactggcagcaggtgcttggcgcgcgttcgaccaacctcggcaacatcacctatgtgctgatgaccagcctcggggcgacgctgggccaggccctgcacctgacccctgcggcgtcagccctgaccggggtctggttcgcccgtattaccggcctgtcgatgtttctcgcttacaccggcgcgttcttcaccctcagctattctcccctgaaagcgattatccagggcacgccaaaagcgctctggccgtcggtgatgacccgtctcaacgtcaacggaatgcccgccgcggcgatgtggctgcagtgtctgctggtcggggtgtttatcgtactggtatcgttcggtggggatagcgcttccgcgttttataacaagctgacgctgatggccaatgtctctatgaccttgccttatctgttcctgaccatcgccttcccgttcttcaaggcgaaaacccatcttgaccggccgttcgtgatcttcaaaaaccgtccgtcgacgctgctggcgaccggcgtggtgctgctggtggtgaccttcgccaatatcttcaccattatccaacccgtcatcgacagcggggactggaacagcaccctgtggatggtcggtgggccgatcttcttctcactgctggcgctggggatctacgaaagctaccgtcggcgcatggcgtccggcgcgctggtgatggagagttaaagaacctgcccggcggtgcagccgggcaggggatggtttacaggctaccagccgtacggcggctggtttttccggccgaggtcatggttttactgctttgcctgccgtcaatactttccagacgcatctggaacggagggaacggcatatcaatgccatgctcgcggaagcccgccaggatcagctgatgcatctcatggcgcagcggcatgcggtgccccatctccgcggcaaaaatacgtagctcgaaaatctggatcccctgctgcaggtcgacgagaaacgcctccggcgccggggtatcgatgaccagcgagcagcgatgcgccgcggcgatgagaattttcgtcacctcttcggtatcggcgtccacaggcgccggcaccgtcagcaccacgcgggtaaccgagtccgacagcgaccagttgataaactgttcggtaatgaacgccttgttcggcacgataatctcttttcggtcccagtcgctgatggtggtcgcacgggtattaatgcgggtgacgctgcccgtcaggtcgcgaatggtgaccgtatcgccgatgcggatcggcttctcaaacaggataatcaggccggagataaagttggcgaagatctcctgcaggccaaacccgagacccacacccagcgcggcgaccagccactgcagcttcgaccactcaataccgatcatcgagaagcccaccagcccgccgaccagcatcagcagatacttagtgatggtggtgatggcgtagccggtgccgggcgttaaatcgagatgctggaggatcgccagttccagcagcgcgggcaggttgcgtaccagctgagtggtgatgatcagcaccagaatggcaatcaacaccgcgccaagcgtaataggctcaaggctttccaccccttgtaccgtcgaggtcacgtcccacagcgagatattctcaaggaagccaaacgccgagtgaatctccgaccacagcacgatgaccgatagcagcgcgatcagcatcagcagggagcgcacaagccgcagcgactgggtactgatggcatcgaggtcgacctcgctgacctccgtctccaccgacccttccgggctgctgacgtgaacgggctcatcttcgccgcgggcgcgctgagcgagaatttccgcgcgacgatggcgggcccggtcgaaggccagccggcggcgctggatcagcatccagcggcggatgatgtgatagaccaccagcagcaggaaccagatggcgaccgaggtttccagacgcgcaagcagcgcctgggcggtggcgaggtagccgacggcggccgccagcatggccaccagcggggcgccaagcatcaggttccacagcaggcggttcaccatattgtcgccattcccctctttatccagatagagcggaataccggcgtgcttaaggctcagggtgaccaccgccagcgcgccgcagatcagcaggaagcacaggcggcccagcgaagcggagaattcgcggtcgttaagattatcgaacatgatcagcgccataatcagcggcacaatcagcccgatgctcatcaggtagtagcgcatcgccttcgccacgcggctacgcggccagccgaagtgggcgataaacagcccgtttggccgggcgaaggtggcgcagatcatcaccacccacagcaaaggcaccgtcgcggtgactccatcgccaatcgccaccgccagcgggaacggccaggcggactgcagaccatagccgagcgtcatccacagcaccggcagcggcgaggccaccagtatcgaccagaagaccgtgcgcagcgtcagccagaagtgatcctgggtgactttccccacccgggcgctggagcgctcgagaaagcgggtgaaatggcgccgcgagctgatgctaaagccaaccagcagcagggcggcaaacagcggcagcagggtctctttgctggtaagcatcatcgcgctggctttgcccagttcgctgatggtatccagggagatcaggcgccgcagatcctggacgatctccagcggccatgagaagccgatggggctgacgtccgaagtccagaacagatagcggtgggtggcttcgttgatctctttcagcgcgtcttccagctggccgttggcgaccttcagcttggtgagctccagcatcagggtgtcgccgccgcgcagcagcgagttcagcagctcgttctgcgtgcgcagctgcgcctgcaggatcttgttctgctcgctggtcagcggttcgccgtcggcctggcggatctgccgcagctgcggctgcttactcagcaaatcttcaaagcgcagacgctgcacgcgcagctgcgccatttccgtatccagctgctgcgggcgagggcgctccggcagccgcgccacctgggcgcgcagggcttcgcccagcagattggaggagcccagccactgcgactgctcgcgcagagtgtttaacgcctggcgcacctgcagcgtttgattcgtcgcctgccgctgctgggacgccaccagatccatgcgctgcgcctgctggttcagcgcctgggagagctcacggttgaccttaaactgggcggtgatgtccggcggcaggttttcactgttctccgccagcagttcggtactctccagcgccttttccgcctcccgctggcgctggctgttttgcagattgcgcagcgcctgcagataggcatccagctgctcgctctgtttttgcgccagctcggaacgggcgcgcgacagctcctggcggttgttggcggagagctgggcgaggtcgagttcatccaccagcgccttcagacgcgctgattccgcctgcagggcaagattttgcgcctgggcgagagcattgttgccggtttgcgtgccgatgcggcgctcaacctcattgagctgacgacgggcatcggtttgctgctgcggcagctggttcagggagtcggcgatttcacgcgcgcgatcctgctcctgctgcgcctggcggctcgattccagcagttggctgctgacctgcaggatctcctggttcagcgcatcggcggtcaggccggttggcacctggcgcggctcttcgctcagattattgagctgggcacgcaggctttgaaacagtttggggaaattgtcgataacgtcctgatactgacgggcgcgctcgagggatgattttcgctcctcaagcgcgttcagcgcggactgcagaacttcaacggtttcaggctgggcgggctttgccgccttcgcctgttccagttcctgggttatctgtttagcatccggggctgtcgcagcgtacgccccgaaactgaggctcaaggccaacaggaaagtgtatatcaggcgcacggcataacccttttgctgaagaattaaccttggtcttgtttatcgtcaaccagcgggctggcgcggtgttcggcgcggatctcttcttccggtaacggcgcgggttcagcggcggcggtcgcttccactgctgtcgccagcggttggccgatcttggtcacggacaggctttgcagcgtgtcgaccagcttcacctggcccggagcaaacaggttgatcacggtggaacccagtttgaagcggcccatctcctggcctttcagcaaggcgatggagccttcgttgtcgccagcgggccaggtccagcgtttaataatgccttcgcgcggcggggtcacggtgccggaccacacggtctcgatgctgccgacgatagttgcgcccaccagaatttgcgccatcgggccaaactcagtatcaaacaggcagatgacgcgctcgttacgggcgaacaggttcgggacgttctgcgccgtcaagtggttaacagagaacaggtcgccaggaacgtagatcatttcgcgcaggatgccgttgcacggcatgtgtacgcggtgatagtcgcgcggcgacaggtaggtggtggcgaagctgccgttacggaacaggtcggccatctgatagttgccggccagcaaggcttccagactgtagtcatgacctttagcctgcaggattttatcgttctcaatggcgccaagctggctgatcacgccatcggccggcatcaccagcacgtttggatcggtattcagcgggcgaacgtcgtcgcgcagcgggcgcacgaagaaatcgttgaaggtgcgataagccgcggtatccggcttctgcgcctctttcatatcgaccttgtagtatttcacgaacagatcgatgaccagcttcgtcagccaacctgcgcgtttgctcgcaccccagcctgcgaggcgggtgagccacagtttaggcagaatgtattgcagtgaaagtttaagatcgtttaacaaagtagcctccaggccatgatatgtcgttcctgaccccgcctgcgggcggggacctgaaaaaaggggacgattctatacgtaaaactcgccaaatggcatccgcgtaagctgcgtcatcatcgctgcccggcagcgcctgacgtgatgctcagcttaatgatcagtcatcggacgaggaaaagtttttacgcgtttttacctgtacctgcgccatgctttccaggatgcggtggtagttctcaaaacggctttcggcgatcttgccgttctctaccgcttcgcgaagcgcacagccaggatcggtatcgtgtttacagtcgcgatatttgcaacggcctaaataatcatggaattcgacaaagccgttggtgatttgttccgcttccagatgccacaggccgaactcacgtacccccggtgaatcaatcacatcgccgccgtgcgggaagtggtagaggcgtgccgcggtggtggtgtgttgacctaagccggaaacgtccgagacatcattggtgaggatctgatcctcgctcaacccgagcagggcgttcagcaggctcgatttaccgaccccggactgcccggcgaagatactgatgcggtcggtcagggccgcttccagcggcttaaggccgtcctgagtccgactggaaaccagcagcacgcggtaaccgatgttgcggtagatatccatttgctcattgacgaagcgcagaccatcatcatccagcagatcgattttattcagcacaatgagcggctcgatatcctgcgcttcgcaggccaccagatagcgatcgataatattcagcgacagctcaggcaggatcgcggaaaccaccacgatctggtcgatattggcggcgataggcttcacgccgtcgtaaaaatccggacgcgtcaggacggaggcgcgatcgtgcaccgcctcgacgatccctttgacgcttacgccgtcggcggcgtctttacccggccgccagaccacgcggtcgccggtgaccagcgagcggatcgtccggcggatattgcagcgatgcacgctgccgtcagcggattcgacgtcggcatgcataccaaagcgactgatgacaatgccttccgacgtttcgccaaacaggttgtcatcgtagtcggccttctccgcagtggttttcagacggcgctggtggttggctttgacgcggcgctgctggcctttggagagtttatttttactcaatcgaactggctcctggtcgcctgatggggcaaaacctctatgatacacgctattttagatgaatatagtcacgcgagaagggtggaaaatagcatgagtgcaaatgaaaacaacctcatttggatcgatcttgagatgacagggctggatccggagcgcgatcgcattatcgaaatcgccaccctggtgaccgatgccaacctgaacattctggctgagggcccgaccatcgcggtgcatcagtcggacgctcagctggcattaatggacgagtggaatgtgcggacgcataccggcagcggtctggtggatcgcgtaaaggccagcaccgtcagcgagcacgatgccgaactggcgaccattgactttcttaagcagtgggtgccggcgggcaagtcgccgatctgcggcaacagtatcggccaggatcgtcgcttcctgtttaagtacatgccgcaactggaagcctatttccactatcgctatctggacgttagcacgctgaaagagctggcgcgccgctggaagccggaaattctcgacggctttaaaaagcagggcactcatcaggcgatggacgatatccgcgagtcggtcgccgagctggcttactaccgcgaacacttcattaaactgtaaaccgcgaccgggccctgtgcgcggcccggtacacttttctgcgttatttaaaccacttctgctgcatctgctggaagtcaggtgtcgccatgaccgcggccagggcatcgttgatggcgttcagcagctccggatcgtctttgcgcaccgcaatcgcatactgcttaccgtaataagccgggtcggtggcccgttcatccatgatggcgtagtcagggttctcctgctgccaggcgtcgagggtggcgaagtcgcccatgacgccggttatttgcccggctttcagcgcggccagggcgctggcgacatcgtcgtaagggacagcctgtacggctttctgtttatcacgcaggtagcgctgatgcagcgtgcctttcaccacgccgacttttttagccttcagatcggcaaaggtatgggcgacatctttgttgacgatcactaccccggagagcgcctggcgatagggtcggctgaaggcgacctgcttctcacgcatcgggatcacttccatgccggcaatcaccgcgtcaaatttcttaaagcgtaaagccgggatcagggtatcgaaacgctgcgccgtgaactggcactgcgcctgcatctgctggcacagggcgtgcgcgagatcgatatcgaagccaacgggctgatttttgccgttggcggtgacaaacggtggattggccgtggtggtgccaaaatggagcgtctcggctgacgcggttccgatggccagcgtgctcagcagcaggacggtgaggacttttctcatgctaattccctgtttggcgtcggggtggcctcgttatacgtcgcgccaccgctgtatgatgcgagcgattttgcgtcattcagccgggcggaaaaagcgattttgcccgttatgacgcttatttatacaattcagcggcgtagatggcgagaaaatgtccatttaaacaaaaaacgcaaaaaagtgatcgtcagggggttgcaggggcatcgaattctcgtataatgcgcctcccgtaacgacgcagaaatgcaaattacgacgccatcgaaatatggcaaaaaatgcagtaacgcgggaatagctcagttggtagagcacgaccttgccaaggtcggggtcgcgagttcgagtctcgtttcccgctccaaaatttgaaagcaccatcctgatcaaaggatttcatctcgcagatgcggggcgaaagccgaagattaagcgggaatagctcagttggtagagcacgaccttgccaaggtcggggtcgcgagttcgagtctcgtttcccgctccaaaatttgaaagacataccacaccagtcgcagttttcaggttgctagacggtagcttgaatgacgatgattaagcgggaatagctcagttggtagagcacgaccttgccaaggtcggggtcgcgagttcgagtctcgtttcccgctccaaattttcttccatctcttatttatccacagtgcaatccagcgccggggatgattttcgtttggtccgcagaaatactgtgaacagagttatccacaggttgtcgttccgtcactggcggcgcaaatgcttcgctttgtaaatagtatctttgtatgtgattgaaatttaacaaataaatttcatttcaaaatgttaatccgatcacttgaccttggtctgcgccttgaaacgcaatgtgttttagattttattcacagcctgtgaatgaatcaggcgtcgcgcggcaagcctttctctaccactctgaccagacgtaattttttcggcagctgtacttcaacggcgtcggcgttccgctttttcagttgctgggcaatcgcccactcaatgtgttcgtcgagaagcgggtgctcgccccggcggctctccagggcgcgaagatgggcttcatcccagggcgcattgcccaacgcgacggcgatattacgcagccagcgcaggtggccaatgcgacgaatcgccgacccttcggtcaccttcagaaaccacgcttcgctccaggcgaacagctccaccagcggcggggcatgcagcgctttgcgtgggctgaaatcctcttcatcggtgagctgtgagaaacggttccacgggcagatcagctgacaatcatcacaaccgtaaatacggttgccgattagtggacggaactcctcggggattgcaccttccagttcaatggtgagataggagatgcagcgccgggcgtcgacggtatagggctcaacgatggccccggtgggacagatggtcatgcaggcgacgcagcgcccacactcctccgcaaccgggctgtcgaccggcaggggcagatcaatcagcagttcgccgaggaaaaagaacgatccggcgtcgcggcttaagataagtgagtgcttacctgtccagcctaggcccgctttttctgcgattggccgttccaggataggcgcggaatcgacaaaaggtctaaaattgagcgaagcacactgttcctgaatcttctcccccagctttttcaggcgattacgtagcagcttatgataatcacgcccgagggcataacggctgacgtaacccagcgtgggatctttcagggtgcgggcaaaggcggcgttagcgggcagatagttcatccgcacgctgatgacgcgtaacgtaccgggcagcagttcgtgaggacgggcgcgcatcataccgtgacgggccatccattccatttcgccgtggtattgtttatccagccatgcctgcagtttgggttcactggcgctgaggtcggtatcggcgatccccacctgctggaacccaagctctgtgccccattgtttgatttgttgcgctaactgaacgagatcgaggggctgtgacatgatggaccatacaatgacgaaaaaccctgacagtataccatacaacatttggcctgcggaggcgctgcgcctggccgaacgagaggcggcggacagcctggggctgacgctgttcgaactcatgcagcgcgcgggcgaggcggcgttccagctggccagctgtgcttatcctgccagcgcgcactggctgatcctctgcggacatggcaacaacggcggcgacggatatgtcgttgcgcgtctggcacaggccgcggggcggcgggtgacgctgctggcggtggagagtgacagcccgctgccggaagaggcgcaggcggcgcgggaggcgtggcttaacgccggcggcgtgatccatgcggcgaccatcccatggcccgacgatatctcactgattattgatggcctgctcggcaccggtctgcgcagtgcgccgcgcgatcccgttgcggcgctcatccaccaggcgaaccaccacccggcgccggtggtggcgctggatatcccttccggcctgaatgcgcagacgggcgcgacgccaggtgcagtggtacaggccgaccatacgctgacctttatcgccctcaagccggggctgctgaccggcaaggcgcgggatgtcgtcgggcaactccaccatcatgcgctggggctcgaacgctggctcgccggacaaagcactcctctgacgcggttttgcgccgcccacctcgccgactggctgccgccgcggcgggccacctcccataaaggcgatcacggcaagctggtgattgtcggcggcgatcgcggcacggcaggcgctatccgtatgtgcggtgaagcggccctgcgcagcggcgcgggactggtgcgagtacttactcacccggagaacgtggcacccattgtcaccgtgcggccggaattaatggtagatgaactgacgccgcagactctgaaagccgcgctggagtgggctgatgtggtggcgattggccctggcctggggcagcgcgaatggggacgcagcgccctgcggacggtggaaagttttaacaaaccgatggtctgggacgccgacgcgctgaacctgctggcattcaatcccgataaacgtcacaatcgcgtgctaacgccgcaccccggcgaagcggcccgtctgctgaacgtcagcgtggcagaaattgaaagcgatcgcttactttctgcgcagcgtctggtaaaacggtatggcggcgtggttgtgctgaaaggcgcgggcacggtagtggccagtgaaagcggggcgatgggcattatcgatgccggcaatgccgggatggccagcggcgggatgggcgatgtgctcaccggcatcatcgccgcgttgttaggacagcacctgacgccgtatgatgctgcctgtgccgggtgcgtcgctcatggcgatgccgccgaccgactggccgcccgcgagggcacccgcggcatgctggcgaccgatctcttttccacgctcaggcgtgttgttaacccggatgtgattgacgtagaccatgattaaccgagtgattcctttacccgatgagcaggccacgctggcccttggcgaccgcatcgcgcaggcctgtaccggcgccaccgtgatttatctgtatggtgatttaggcgcggggaaaacgaccttcagccgcggctttttgcaggcgctcggtcaccgcggcaatgtcaaaagcccaacttataccctggtggagccctataccctcgagaacctgatggtgtatcacttcgatctctaccgtctggcggatcctgaggaactcgaatttatggggatccgtgattattttgccgacgatgccatctgcctggtggaatggccgcagcaaggcgcaggtgtcctgcctgacccggatgttgaaattcaccttgattaccaggcacaagggcgtgaggcgcgtattaccgcgatctcctcacggggtgaatctttactggcgcgtttagccttttagcctgaaggatgacgggatgaagtatcgcataaccacctggcttgccgctgcgctgatgctgtcgagtcttcacgccactgcggcgagtttatccgatatccaggtctctaacggagaccagcaggcccgtattaccctaagctttgtcggtgagccggagtactcctttaccccacagggtaaacgtctggtggcgctggatatcaagcagaccggcgtattgcagggactaccgctgcagtttagcggcagcaacctggtgaagagtattcgcgccggcacgccgcaggatacgcagacgctgcgtctgctggtggatctgacggaagatggcaaaacccgggcggtgaagcaacagaacggggcgaattacacggtggtctttaccatcaacgccgaagcgcctccgccgcccgtggtggtgaaacgggccgacccgccgccggtgatgccttcccggacgacgacgccagggcgtaacccgttcagctcgtcgggtcatgaacggcagacggtgatgacctcctctcagccggcgatgaccaacaatcagaccgtgactcgcccggcggcccgcacggtgtcggcggatgataaagtcattatcgccattgatgccgggcacggcggccaggatcctggcgcgattggcccgaacggcaccaaagagaagaacgtcactatcgctatcgcgcgcaagctgcgggcgttactgaacgccgatccgcagtttaagccggtgctgacccgcgacggggattactttatttcggtgatgggccgctctgaggtggcgcgtaagcaaaacgccaatttcctcgtctctatccatgctgacgccgcgccaaaccgcgatgccaccggcgcctcggtgtgggtgctctcgaaccgtcgcgccaacagcgaaatggccggttggctcgagcagcatgagaagcagtctgaactgctcggcggtgcgggcgatgtgctggcaaacagccaggccgacccctacctgagccaggcggtgctggatctgcagtttggtcattcccagcgcgtcggctacgatgtggcgaccaacgtgctgagccagctgcagcgtattggcaacctgcacaaacgccgcccggagcatgccagccttggagtgctgcgctcgccggacatcccgtcgatcctcgtggaaacgggctttatcagtaacaacggcgaagagcggctgctgggtagcgatgattaccaggagcagattgcggaggcgatttataacggcttacgcaactactttatgcagcatccgctgcagtcggcgcctcgcggcgaggcggcgcagaccgccagcgccgcggcgccgggcgggatgttgattaactaaggagcaggggatgccgattcaggttctgccgccgcagctcgccaaccagattgccgccggcgaggtggtggagcggcccgcgtcggtggtgaaagagctggttgagaacagtcttgatgcgggtgccacgcggattgacattgatatcgaacgcggcggcgcgaagctcattcgcatccgcgataacggcagcggcatcaaaaaagacgagctggcgctggccctggctcgtcatgcgaccagcaagatcgcctcgcttgacgatctggaggccattattagcctcggctttcgcggcgaagcgctggccagtatcagttcggtggcgcgcttaacgctgacttcgcgcacggcggagcagcaggaagcctggcaggcgtatgctgaaggccgcgatcaggcggtgacggtgaagccggcggcgcacccggtcggtaccactctggaagtcctcgatctgttctataacaccccggcgcggcgcaaatttatgcgcaccgaaaagaccgagttcggccacattgacgaggtggtgcgccgcattgcgctggcgcgtttcgacgtcactatcaacctcagccataacggcaaggtgatgcgccagtatcgggcagtcgctcaggatggccagcgcgagcgccggctggggacaatttgcggcgccgcttttctcgaacatgcgctggcgatcgagtggcagcatggcgatctgaccctgcgcggctgggtcgccgatccgctgcataccaccccggcgctggcggaaattcagtattgctacgttaacgggcggatgatgcgcgatcggctgatcaaccatgctatccgccaggcctgtgaagacaagctaggggccgatcagcaaccggcgtttgtgctgtatctggagatcgatccccatcaggtggatgtaaacgtccacccggccaagcatgaggtgcgtttccatcagtcgcgcctggtgcacgactttatctaccagggcgtactgagcgtactgcagcagcagcttgacgcgccgctggcggaaaaagacgacccgccggcgccgcgcccgatgccggagaaccgcatcgccgcgggcggcaaccagtttgcgcggccagcggaagcgcgggagcctgcgacccgcttcagcatcacgccatcgcgtgagcctgcggcctccagcggcaaaccgggcggcgcgagctggccgcatgcgcagccgggttaccagaagcagcagggagcgctttatcgtcaactgctcgacacgccaacgtcgccaaagccagcgttgcagcctccggcggcggcagagttggccggtcacagtcagagctttggcagagtgttgacgattgttggcggcgactgcgcgctgctggagcgcgagggcggtctggcgctgctgtcgttgaccgttgccgagcgctggctgcgccaggcgcagttgaccccgggagcggaggcggtatgtgctcagccgctgctgatcccgctgcggttaaaagttacggaaggggaaaaacaggcgctggccgccgctcagccggcgctggcgcagctagggatcgatgtgcataccgatgccctgcacgtgacggtgcgcgcggtccctttacccttaagacaacaaaatttacaaatcttgattcctgaactgataggctacctggcgcagcaaaacgcattcgacgtcggcaatatcgcccaatggatggcgcgtaatctgacgagcgaacagacgtcatggaatatggcgcaggcgattgcgctgctggcggacgttgagcgtctttgcccgcagctggtgagaacgccgccgggtggcctgttacaacctgtagatctccattcggcgatgaatgccctgaaagatgaatgatgtaaccgaggcgagcctgcccaaggcaatttttttaatgggcccgacggcctccggcaaaaccgcgctggcgatagccttacgtaaagttttgccagtagagttgattagcgttgattccgccctcatttatcggggaatggatattggcaccgccaaaccggatgctgcggagcttagcgctgcgccgcatcggctgctggatattttggatcctgcggaggcctattccgcggcggattttcgccgcgatgcgctggcggcgatggcggatattgtcgccgccgggcgaattccgctgttagtcggcggaacgatgttgtatttcaaagcgttgctggaaggattgtcgcccttaccgtcggctgacccagaggtcagagcgcggattgagcagcaggccgcagagcaggggtggaatgcgttacatcagcaattacaggagatcgatcccgtggctgctgcgcgtattcatccaaatgatccgcaaaggctttcccgggcactggaagtttttttcatttcgggtaaaactttaacggaactgacgcaaacgtcaggagacgctctgccatatcaggtgcatcagttcgccatcgccccggcgagccgtgaactgctccatcaacgcatagaacagcgttttcatcagatgttagcttcaggttttgaagcagaagtacgggcgctttttgcccgcggagatttgcatacggacatgccttccatccgttgtgtcggataccgccagatgtggtcatatctcaatggcgagatcccgtatgatgagatggtttatcgaggtgtttgcgccacgagacagttagccaaacgtcaggtcacctggctgcgcggttgggaaggtgtgcactggttagacagtgaacaacctgaacaagcgctcaacaaagtattacaggttgttggtgcgagccagaactgaacgtgtacaattaaacggtatcgtgcgtaattttttttgagaatcgtaaggttctgagtacaaaacaagcatacatataaggaaaagagagaatggctaaggggcaatctttacaagatccgttcctgaacgctttgcgtcgggaacgcgttccggtttctatttatttggtgaatggtatcaagctgcaagggcaaattgagtctttcgatcagttcgtgatcctgttgaagaacacggtcagccagatggtctataagcacgcaatttctactgttgtcccgtctcgcccggtgtctcaccacagcaacaatgctggcggcggttccagtaactatcaccacggtggtagcgcgcagggttcttctgcgccgcaacaagacagcgacgacgccgaataaggccagtgctgtttttccacgccggggagccaggttttctgcgttccccgctggtattttataaggggtttacgcttgtttgaccgttatgacgccggtgagcaggcggtactggtacacatctatttttcgcaagacaaagatatggaagatctccaggagtttgaaactctggcctcttccgccggtgtcgaagcaatgcaggtgattaccggtagccgtaaagcaccgcacccgaagtattttgttggtgaaggtaaggcagtcgaaattgcggaagccgttaaagcgaccggcgcttcggtcgtgctcttcgatcatgccctgagtccggcgcaagaacgtaacctggaacgcctgtgcgaatgccgggttatcgatcgcaccggtcttattttagatattttcgcccagcgcgcgcgcacccatgaagggaaattgcaggtcgagctggcgcagctgcgccatatggcgactcgccttgtccgcggttggacccaccttgaaagacagaagggcgggattggtttgcgtggcccgggtgaaacccagctcgaaaccgaccgccgtttattgcgtaaccgtatcatgcagatcctgtcgcggctggaaaaagtcgagaaacagcgcgagcaggggcggcggtcgcgtgcgaaagccgatattcctaccgtgtcgctggtgggctataccaacgccggaaaatcaacgctctttaaccagatcactgccgccgaggtctatgccgcgaaccagctgttcgccaccctggacccgacgctgcgccgcattgacgtccctgacgtcggcgaaacggtgctggccgataccgtcggctttattcgccacctgccgcacgatctggtagccgcgtttaaagcgacgttgcaggagacgcgtcaggcgacgctgctgctgcatgtgattgatgcggcggatgtccgcgtgcaggaaaacattgatgcggtaaatacggttctcgctgaaattgaggccgatgagatcccggcgctgctggtgatgaacaaaatcgacatgcttgacgattttgaaccgcgcatcgatcgcgacgatgaaaataaaccgattcgggtctggctttcagcccagaccggggttggcgtaccactgctttttcaggcattaacggagcgtctttccggtgaagtggcccagcatacgctgcgcttaccgccgaaagaagggcgactgagaagccgtttctatcagcttcaggcgatagaaaaagagtggatggaggatgacggcagcgtgagtctgcaggtgcgcatgccgatcgttgactggcggcgcctctgtaagcaagagccaacgcttgttgactatgtggtttaaccttgcagcttgcctgaagatattgacccctgtggggatatcaaaaacaaatatggagcatatacatggcgtggaatcagcccggtaataacggacaggaccgcgacccgtgggggagcagcaaacctggcggcaactctgagggaaatggcaataaaggcggtcgcgagcaggggccaccggatctggatgatatcttccgcaagttaagtaaaaaacttggcgggctcggcggcggcaagggcggactgggcggcggcaatagcgcgcaggggcctcgcggaccgatgggcgggcgtattgtcggcatcgttgccgcggcggcagtgattatctgggcggccagcggtttctataccattaaagaggccgagcgcggcgtggtcacccgttttggtaagttcagccatctggttgagcctggcctgaactggaaaccgacctttatcgataacgttcaggcggtgaacgtggagtcggtgcgcgaacttgcggcttccggcgtcatgctgacctctgacgaaaacgtggtgcgcgttgagatgaacgtgcagtaccgcgtcaccgatccggagcgctatctgtttagcgtgaccagcgcggacgacagtctgcgtcaggccaccgacagcgcgctgcgcggcgtgatcggcaaatacaccatggatcgcattctgaccgaaggtcgtaccgtgatccgtagcgatacccagcgtgagctggaagagacgattcgcccgtacaacatgggtatcactctgctggacgtcaacttccagacggcgcgtccgccggaagaggtgaaggccgcgtttgacgatgccattgccgcgcgtgagaacgagcagcagtacattcgtgaagcggaagcgtataccaacgaagtccagccgcgggcgaatggtcaggcgcagcgtatcctcgaagaggcacgcgcctataagacccagaccgttctggaagcccagggtgaagtggctcgctttgcgaagatcctgccggaatacaaagccgcgccggaaattacccgcgagcgtctgtatatcgaaaccatggaaaaagtgctgagccacacccgtaaagtgctggtcaatgacagcaaaaacggcaatctgatggttctgccgctggatcagatgctgaaaggcgccgctgcgccggcagcaaagagcgatagtagtgacgccagcgatctgctgcgcctgccgccagcatccagctcaagcagcgccagcacctcatcaacctcgagctcaaccgggggtagcattatggaccaacgccgcgctaacgcgcagcgtaacgactaccagcgtcagggggaataacgatgcgtaaatctgttatcgcgatcattgtcatcgtgctggtagtgctctacatgtctgtctttgtcgtaaaggaaggcgagcgcggtatcacgctgcgtttcggtaaagttctgcgcgacgacgaaaacaagccgctggtgtatgcgccaggcctgcacttcaagatcccgtttatcgaatcggtgaagatgctggatgcgcgtattcagaccatggacaaccaggctgaccgtttcgttactaaagagaagaaagacctgatcgtcgactcctatatcaagtggcgcatcagcgacttcagccgttactacctggcaaccggcggcggcgacgtctcccaggccgaggtactgctgaagcgtaaattctctgaccgtctgcgttctgaaattggtcgtctggatgtgaaagatatcgtcaccgactcccgtggtcgcctgaccctggaagtgcgcgatgcgctgaactcgggttcggccggtacggaagatgaggttagcaccccggcggctgacgacgcgattgctaaagcggcagagcgtgtggaagccgaaaccaacggtaaagtgcaggtgatcaacccgaacagtatggcggcgctgggtatcgaagttgtcgacgtacgtatcaaacagatcaacctgccggcagaagtgtcggaagcgatttataaccgtatgcgcgcggagcgtgaagcggttgctcgtcgccatcgttcacagggtcaggaagaggcggaaaaactgcgcgcgactgcggactatgaagtcaccaagacgctggcggaagccgagcgccagggccgtatcctgcgtggtgaaggtgatgcggaatcagcgaaactgtttgccgacgcgttcagccaggatccaggcttctactcctttatccgtagcctgcgtgcctatgagaagagcttccagagcaatcaggatgtgatggtcctgagtccggacagcgatttcttccgctatatgcgttcaccggattcggcgcgtaaataagccggagaaggtgtaaacctgaagtaataatgcgaaaaggcgcctgaaacaggcgccttttttcatgctgcgagggcgggaattaattgccgagtagcttgttcagcaggccgccgatcaccggcaggcctgccagcgcactttcgatggtgccgccgatagtcgacccaacgctttcgcccagggttttgcccaggtccggcgccaggtcggccagattgagggtgccaagcagtggcaggttaatgctcagggcatcagtgcccatcgtccatgcggctgcgccgaccttgctgcctaaggccgccagaccatcctgtagccagcctgcgccgctcacattttcgatttcaaatgcggttaattctctcatcataatcttcctgattaagtagacgtaccgggttgtagtacgcgatggcatagttacaatttaaaaaatatccagcaatacaattagttgtgaattttgtttcacctttccggttcataatgaagctgaaatacgggacaatgtgaaatgagggaatgaattcaccatgctggccgagacgcccgcgagggcggcaatgatacttttcaattagggttgacgatgaactccaccatttggctggcgctggcgctggttttagtacttgaagggcttggcccgctgctttatccgcgcgcctggcgcaagatggtcgctagcctgagccagctaccggataatttattgcgtcgttttggcggcggacttgtggttgccgggattgtgatctactacatgttgaggaaatcgattggctgatcaaaaagtggtcggatttgccttattttggatgcaaaaagtgctgtaactctgaaaaagcgatggtagaatccatttttaagcaaacggtgattttgaaaaatgggtaacaacgtcgtcgtactgggcacccaatggggtgacgaaggtaaagggaagatcgtcgatctcctgactgaacgggctaaatatgttgtgcgctaccagggtggtcacaacgccggccatactctcgtaatcaacggtgaaaaaaccgttctccatcttattccatcaggcattctgcgtgaaaacgtcaccagcatcatcggtaacggcgtcgtgctgtctccggccgcgctgatgaaagagatgaagggcctggaagaccgtggtatcccggttcgcgagcgtctgctgctctctgaagcctgcccgcttatccttgactatcacgtggcgcttgacgtggcgcgtgaaaaagcgcgtggcgcgaaagcgatcggcactaccggtcgcggcattggcccggcttacgaagataaagtcgctcgtcgcggtctgcgcgttggcgatctgttcgataaagcaaccttcgccgataaactgaaagaagtgatggaatatcacaacttccagttggtgaacttctacaaagcagaagcggttgactaccagaaagtgctggacgatgtgatggcgattgccgacatcctgaccagcatggtggtggacgtatccgacctgctggatcaggcgcgtcagcgcggcgacttcgtgatgttcgaaggcgcgcagggtacgctgctggatatcgaccacggtacctacccgtacgttacgtcctctaacaccaccgcaggtggcgtggcgaccggctccggcctgggcccgcgttatgtggattacgtactgggcatcattaaagcgtactcgactcgcgtcggtgcaggtccgttcccgaccgagctgtttgatgaaactggcgagttcctctgcaagcagggtaacgaatttggcgccaccaccggccgccgtcgtcgtaccggctggctggacgcggtcgcagtccgtcgcgcggtgcagattaactccctgtccggcttctgcctgactaaactggacgtcctcgacggcctgaaagaagtgaaaatctgcgttggctaccgtatgccggatggccgcgaagtgaccaccactccgctggctgccgataactgggaaggtatcgagcctatctacgaaaccatgccgggctggtccgaaaccaccttcggcgtgaaagagcgcagcggcctgccgcaggcagccctgaactacatccagcgtattgaagagctgaccggcgtgccggtggatatcatctctaccggtccagaccgtaccgagactatgattctgcgcgatccgttcgacgcgtaatcactctcaaggggcgccgttcgggcgcccttgtttttgctgttcgcccgccccatttcaaataaattagcggcctgagcgctggctggtttatcatcaataataatgatgtcgctcgacataccctgttttcttttccctgaggtttatgtgcagttaacgagtttcaccgattacggactacgcgcgctgatttatatggcgtcgctgccggaaggacgaatgaccagtatctcggaagtgaccgaggtctatggcgtctcccgtaatcatatggttaaaataatcaatcagttaagtcgcatgggctacgtgactgccgtgcgggggaagaacgggggcattcgcctcggcaaaccagcaggacagatccgcgtcggtgacgtggtgcgtgaccttgaacccttatcgctggtcaactgcagcagcgagttttgccacattacaccagcctgtcgtctgaaacaggcactagctgaagccgcgcagagttttctcaaggaactggataactatacgctggctgatttggttgagaagaatcaaccgctttataaattattgctggtggagtgacgccactctgccggagatgacaacggaggaaccgatatgtcacaagatccattccaggaacgcgaagctgagaagtacgcgaaccctatcccgagccgggaatttatcctcgaacatttaactaaacgggaaaagcctgccagccgcgatgagctggccatcgagttaaatatcgagggcgaagagcaaaccgaagcgctgcgccgccgcctgcgcgcgatggagcgcgacggtcagctggtcttcacccgccgccagtgctatgccctgccggaacgcctcgatctcctcaaaggaaccgttattggccaccgcgatggctatggtttcctgcgcgttgaagggcgcaaagacgatctgtacctgtcgtcagagcagatgaaaacctgtattcacggcgaccaggtgctggctcagccgctgggcgcggaccgtaagggccgccgcgaagcgcgcatcgtccgcgtcctcgtgccgaaaaccagccagatagttggccgttacttcaccgacgctggcgtcggctttgtcgtcccggacgacagccgcctgagcttcgatatcctgatcccgccggaagagataatgggcgcgcggatgggctacgtggtcgtggtcgagctgacccagcgaccaacccgccgcaccaaagcggtgggtaagatcgtcgaagtgctgggcgacaacatgggcaccggcatggccgtcgatatggcgctgcgtacccatgaaattccttatgtctggccgccggcggtggaaaaacaggtttccggtctcaaagaacaggtgccggaagaggcgaaggtcggacgcgtcgatttacgctcgctgccgctggttaccattgacggcgaagatgcccgcgacttcgatgacgcggtgtactgcgagaagaaacgcggcggcggctggcgcctgtgggtcgccattgccgacgtcagctactacgtgcgcccggggacgccgctggatgcggaagcgcgcagtcgtggcacctcggtctacttcccgtcgcaggtagtgccgatgctgccggaagtgctgtctaacggtctatgctcgctgaacccgcaggtcgatcgcctgtgtatggtgtgcgagatgacgatttcgtcaaaaggccgtctgaccggttataaattctatgaagcggtgatgagttcgcatgctcgcctgacctacaccaaagtgtggcatatgctgcagggtgaccaggaactgcgcgaacactacgcgccgctggtgaagcacattgaagagctgcataacctctacaaagtgctggagagcgcccgcgaagagcgcggtggtatctcatttgaaagtgaagaagctaaattcatcttcaatgccgaacgccgtattgagcgtatcgaacagactcagcgtaacgatgcgcataagctgattgaagagtgcatgatcctggcgaatatctccgccgcgcgcttcgttgagaaggcgcaggagccggcgctgttccgtatccatgataagccaaccaccgaagcgattacctccttccgtaccgtgctggctgagctgggactggagctgcctggcggcaacaagccggagccgcgtgattacgccgaactgctaacctccatcgccgatcgcccggatgcggaaatgctgcagacgatgctcctgcgctccatgaagcaggcggtctacgatccggaaaaccgcggtcactttggcctggcgctgcagtcatatgcccacttcacctcgccgattcgtcgttacccggacctgtcgctgcaccgcgctatcaagtatctgctggccaaagagcagggacataaaggcaacagcaccgagaccggcggctggcactacagtatggaagagatgctccagctgggtcagcactgttcgatgaccgagcgccgcgccgacgaagcgacgcgcgaagtgtctgactggctgaagtgcgacttcatgcaggatcaggtgggcaacatcttctccggcgtgatcgccagcgtgaccggctttggcttcttcgtccgcctgaacgatctgtttatcgacggtctggtgcatgtttccagcctggataacgactattatcgtttcgaccaggtggggcagcgtctcattggtgagtccggcggccagacctatcgcctgggcgaccgcgtggaagtccgtgtggaagcggtcaacatggacgagcggaaaatcgactttaccctgatctccagcgagcgtgcgccgcgtaatgtcggcaagaccgcccgtgagaaagcgaaaaagagtacctctggcaagccgggcggccgtcgccgccaggtgggtaagcaggtaaacttcgagccggacagcgctttccgtaaagagaaagagaccgcccgaccgaagaaagagaaaaaagcgaaaaaaccgtcggcgaaaacacagaaaatcgccgccgcgacgaaagccaagcgcgcggcaaagaagaagatcgccgagtgattgacctcccttcaccctgaagtctgctgacgcaggatggggtgaagggggcagataacagaacctaaaacgagtacatcaatgagtgaaatgatttacggcatccatgcggtgcaggcactgctggagcgcgcacctgagcgttttcaggaagtttatattctgaaaggccgtgaggataagcgcttgctgccgctgatccatgccctggaagcgcagggcgtggtgattcagctggccaaccgtcagtttcttgatgagaagagcgaaggcgctgtgcaccaggggatcattgcccgcgtgaagccggggcgtcagtatcaggagaacgatctgccggatctgctggcgcagctcgatcaaccgttcctgctgatcctcgacggcgtaaccgatccgcacaacctcggcgcctgcctgcgtagcgctgacgccgccggcgtgcatgcggtgatcgtgccaaaagatcgttccgctcagttgaatgcgacggcgaagaaagtggcctgcggcgcggcggagaacgtcccgctgatccgcgtcaccaacctggcgcgcaccatgcgtctgctgcaggaagagaacgtctggatcgtcggaaccgcaggggaagccgaccatacgctgttccagagcaaaatgaccggcccgatggcgctggtgatgggcgcggaaggcgaaggcatgcgtcgtctgacccgcgaacactgcgatgagctgatcagcatcccgatggcgggcagcgtctcctcgctgaacgtctcggtggctaccggcatctgtctgtttgaagcagtacgtcagcgcagctaagctgaaccatcgacgaatcaaaaaaagccatcctccaggatggcttttttgtgaccgctctcgcgggcgagtatccctccggataaccatacttatggctatcgccattgatggagggagacacgatgcactggcaaacgcacaccgtttttaatcaacccaccccgctgaataacagcaatctgtttctgtccgataccgctctgcgtgaagcagtggtccgcgaaggcgccggctgggatggcgatctgctcgccagcattggccagcagctggggacagccgaatcgctggagctgggacgcctggccaacagcaatccgccggagctgctgcgctatgacgccaccggcgcccggctggacgacgtgcgcttccatcccgcctggcacctgctgatgcaggggctgtgcgcgaatcgggtacataacctcgcctggcaggaggatgcccgcgaaggcgcgtttgtcgcccgcgccgcccgctttctgctccatgcccaggtggaggccgggacgttgtgcccgattaccatgaccttcgccgcgacgcccctgctgcagcacgccctgcccgcgccctttcgcgactggctgtcgccgctgctgagcgaccgttacgatccgcaccttgcgcctggcggccagaagcgcggcctgctgatcggcatggggatgaccgagaagcaaggggggtctgatgtgctgagcaataccactcgcgcggagaaaacggcggaagggttttaccgactggtgggacacaagtggttcttctcggtgccgcagagcgatgctcacctggtgctggctcaggctccggcggggctctcatgcttctttgtgccgcgtctgctgcccgacgggcagcgtaacggcgtgcgtcttgaacgcttaaaagagaagctcggcaaccgctccaacgccagtagcgaagtggagttttatgaggcctgcggctggctggtgggcgacgaaggcgacggcgtgcggcagatcctcaggatgggcggcctgacccgctttgactgcgcgctgggcagccatgccctgatgcgtcgcgccttctcggtggtgctgtatcacgcgctacagcgtcaggcgtttggcaaaaacctggtcgaacagccgatgatgcgccagctgctggggcaaatggcgctccgtctggaggggcagaccgcgtttctgtttcgcctggcgcgggcctgggaccatcgggatgatgcccgggaaagcgcctgggcgcgcctgtttacgcctgcggccaagtttgccatctgtaaggccggtatcccgtttgtcgccgaggcgatggaagtgctgggcggcatcggctattgcgaggagagcgaactaccgcggttgtatcgcgagatgccggtcaacagcatctgggaaggctccggcaatattatgtgcctcgatgtgatgcgggtgctcagcaagcagccggcggcgatggagctgctggccgcggagtgtgcggaggtgaaaggacagaaccgccatctcgaccgcgcatggcgtcagctgcagcaactgctgaaacgacccgccgaagagcaggggagagagattgcccggctggtctatcgtcttggcgcgggggcgcagatgctgcgccatgcttcgccgccgctggccgaagcctggtgcaggatgatgctcgacacccgcggcggcatacgtcttgacgcgccgaccctcgacgacctgctgctgcgggctatggggcgcgggcgccaggcgcctcaggcgtagagaatggcctgcacgcgccagctgtccggctgttgttcctcgtacatctgaataatgcgataccaggaggcgccttgctcgtctgctttgcgggcaatggcgtgctctacatcctgttggctaccggaaagattagtgacggagatcagaccgatttcattcaggccagtgacgcaatccgcgctggcgaattcggctgactgcgcggacgtattggccgtcgcagcggttaacagcaggctggatagggtaaaagatcgtttcatcgtcagctccatttcacgtagtcccaagggcagtccgttgctaacgtcctgccaggtggctggccgaacgttattatgcacaggagaacgtgaatggacgcaaagctgtgtaaagcagatttaaagacgccgcctcgttatcgacgatagaggatcgcctgcgaataccactggccgggtaccatggtgtcatcgatcatgatgatgacgtagtaatcggctttggccgcttctgctttggccttcagcgccgcttcgacatccatcggcgaaccgtacatcagtacgctcaccgtggccattttatgcaggccagccgtctggtagcgctggatctcctgcggatggtcggtggcgggcggcggggcttccggcgttccctgcagggcgctacacccgctgaggacgatagccagtaaccacggtgaaaacctgcgcataaccatatctcgtttcctgatagtgatagtgtagtggtagccttaacaggattgccggggaatgttcccgaactgttatctctgacgcgattttcgaatgaaaatgttgtgaaagcgtaaccgggttctcaacattatgaatcgtagcaaactgggttgcctggtgaatgaattttcccatgacgcctaaccacgatagagaaggaagacgataaatgattgcactagaaatgcgcaacctcggcggtggtgaaattttacatgcctgtccgcaggagagtctggataagcccttgccctgtatcgtcttttatcatggctttacctcgtcgaagctggtctacagctactttgcggtggcgctggccgaggccggattccgggtgatcatgccggacgcgccggagcatggggcgcgctatcagggcgatgaggccgggcggatgcagcgcttctggccgattctgcagcagaatttcagggagtttcctgcgctgcgcgaggcgataatcgctgaaggatggctggaaggggagcggctggcggtggcgggcgcttcgatggggggaatgacggcgttgggcatcatgacgcatcaccccgagctgaacagcgtcgcctgtctgatggggtcgggctattttcgttccctgtcgcaaaccctgttcccctcgcctgattttgatgtcgatagcctcaacgaatgggatgtcagccatcagctggcgtcccttgcccggcgaccgctgctgctctggcatggcgatgccgatgacgtggtgccgccggaagagaccttccgtcttgagcaggcgctgcggcaaggcgatcttgccgccaggctgacctgtgtctggcagaaaggcgtccgccatcgcattacgccagaggcgctggctaccacggtcgccttttttcagcagcacctttaaacgcggattacgctgacgccctgatcctcaagctgtttgaggatcgcggcatcggcctgtttgccggtgatcaccacgtctatttgtccggcctggctgaatagcatcccggcgcgctcgccgatcttgctgctgtcgaccagcaccgccagtttgccgaccacgttaagcattttttgctcggccatggcggtcaacatatccgttttgtagaggccttcggcggtgagccctttgccgctggtaaacatccagtgtccggcatagaggctgttctcgctaccgtgggggctgagggtgatggcgtggctgcggttgtactggccgcccatgataatcacgctgtcatgctcctggtcgatcaggtagttagccagcggcagatagttggtgatgatctgcaccggtttgccgcacagttcccgacccaacagaaaggcggtggagccgcagttaatgacgatgctctcacccggcgcgatcagttgcgaagcggcgcgtgcaatacgcactttttcatccagattttgcgcctggtggatgttcatcggcgtccagcgggggcgctgttcgctaatggcttccgcgccattacgaacctttttcagtttgccgctttcatccagcttgttgatatcacgtcgggcggtagcgggtgagatcccgagccgcgacatcacctgctccacggtaacaaaccccgtttgggcgagcagatccagcagaatttggtgcctttgcgcttccgtcatgagcgaatccgattaaaagtgaacggcaaagatgatatttgaaatcatgtgaaaatactaaccctgcggcggggtatttccggcaggcagggcctgccggcggcgacttacaggaaggatttgaaaggcagatccggctcaatggtaaagcagtcgtcgaaaccgcgcgggtagtgatattcgaaattgtctttatccagcggccaggtaaatttgccgccgacctgccagataaacggcttgaagccgtacttcagacgatcctttttcatctcccacagaacgcggatctcctgcggatcggcctgaaagtttgaccagatatcatggtggaacgggatcacaactttggcgttgagcgactctgccatgcgcaggatatcggcgctggtcattttgtcggtgatcccgcgcgggttctcgccatacgagccgagggcgacgtcaatccgatgctcgttgccatgcttcgcgtagtagttggagtagtgggaatcgccgctgtggtacaggttgccgcccggtgttttaaacaggtagttgaccgcgcgctggtccatgccgtccggcagtacgccagcggctttttggtccgccgggagggtgatcagcgcggtgcgatcgaacgcatcgagcgcatggatctcaatgtctttgatcttcacgacatcgccaggtttcatgacgatacagcgcgctttcggcacgccccaaccgatccacaggtcgacgcaggttttcgggccgataaacggcacatcggccgggcagttctgcatgacggcggcggcgacgttgacgtcaatatgatcgttgtgatcgtgggtcgcgaggaccgcgtcaatctggcgaatggcgaacggatccagcacgaacggcgtggtgcgcaggttcggctgtaattttttcacacctgccatccgctgcatctggtggccggttttcatcagcggattgccgtggctctgtttgccagtgccgcaccagaaatcgacgcagacgttagccccgccttcggattttaaccagataccggtacagccgagccaccacatggcgaaggtgccgggcgcaacctgctcctgctcaatctcttcattcagccagctgccccattccggaaaggtgttcaggatccatgattcacgggtgatggtctgtactttactcatcgtgctcttcctcgtattttcaatagtaatcaaattttgattggttttgatttatgttgtcactggattttcaagattgcaatcttgttttccatcaattttacgaagagatgcgcatcatctctcagggggtccagcatccataaaggttgtgctttgttttatctatatgatttgaaaatgtttaattatgtttcggcgctactgatcggcaatagtcacaatgaaatagaggattattgcggcgcgcgtcacatttaatcaaattcaatcttgttgtgattatttttgattattagagtgggcagcgagaaatgctgagcgtaaggcgcgttcagcgccttcaccatcgggagtgtgttatggcaatcctctacaacatctttaccgttttctttaatcaggtgatgaccaatgccccgctgctgctgggtatcgtcacctgtctgggctatatcctgctgcgcaaaagcgtcagcgtgattattaaaggcacgatcaaaaccattatcggcttcatgctgttacaggccggctccggcatcctcaccagcacttttaaaccggtggtggcgaaaatgtcagaggtgtacggcatcaacggcgcgatctctgacacctatgcctcgatgatggcgaccatcgaccggatgggcgaggcctatagctgggtgggctatgcggtgctgctggcgctggcgctcaacatctgttacgtcctgctgcgccggataaccggcatccgcaccatcatgctgactggccatatcatgtttcagcaggcggggctgatcgccgtctcgttctttatctttggttacggaatgtggacgaccatcatctgtaccgccgtgctggtctccctgtactggggtatcacctccaacatgatgttcaagccgactcagctggtcaccgacggctgcggcttctccatcggtcaccagcagcagtttgcctcgtggattgcctacaaagtggcgccgtatctggggaaaaaagaggagagtgtggaagacctcaagctgccaggctggctcaatatcttccacgacaacatcgtttccaccgcgattgtcatgaccattttctttggcgcgatcctgctttcctttggtattgacgtcgtgcaggcgatggcggggaaaacccactggacggtctatatcctgcagaccggtttctccttcgcggtggccattttcatcattacccagggcgtgcggatgttcgtcgccgaactgtccgaagccttcaacggtatctcgcaacgcctgatccccggcgcggtgctggcgattgactgcgccgcgatctatagctttgcgccgaatgcggtggtgtggggctttatgtggggcaccatcggccagctgattgccgtcggcattctggttggcattggctcttcaattctgattattccgggctttatcccgatgttcttctccaacgcgacgattggcgtctttgccaaccacttcggcggctggcgcgcggcgctcaagatctgcctggtgatgggcatggttgaaattttcggttgcgtgtgggcggtgaagctcaccggtatgagcgcctggatgggaatggcggactggtcgattctggcgccgccgatgatgcagggcttcgcctccatcgggctggcgtttatggccgtcatcatcctgattgctctcgcttatatgttcttcgctggccgcgcgctgcgcgccgaagaagacgcggaaaaacaactggcagaggcctctgcccaataaggagttctgattatgaccgtacgtattctggctgtgtgtggtaacgggcaaggcagttccatgatcatgaaaatgaaagtggatcagttcctgacgcaatccaatatcgaccacacggtgaacagctgcgcggtgggtgaatacaaaagcgaactaaacggcgcggatatcatcatcgcttcaacccatatcgcgggggagattaccgtctccggcaataaacacgtggtgggggtgcgtaatatgctttcccccgcggatttcgggccaaagctgctggaggtgattaaagctcatttcccgcaggacgtgaaataaggagcggctatgaaactccatgaatcactggcgcagaatcactccattcgcctgcaggcggaagcggaaacctggcaggaggcggtgaaaatcggcgtcgatctgctggtggccgccgacgtggtggaaccgcgctactaccaggcaatcctcgacggcgtcgcgcagcacggcccctattttgtgatcgctccgggattagccatgccgcacgggcggccggaagagggcgtcaaaaaaaccggctttgcgctggtcacgctaaagaaaccgctgattttcaaccacgaagataacgacccggtcgacatcctgatcaccatggcggcggttgacgccaccacccaccaggaagtgggcatcatgcagatcgttaacctgtttgatgacgaagccaatttcgaccgtttacgcgcctgccgcagcgagcaggaagtgctggatttaatcaaaaacgccaccgcggcggctgtttaaaaggaacactatcatgtcattacctatgttacaggtcgccctggacaaccaaacgctggccagcgcttatgaaacaacccgtctgatcgccgaagaggtagatatcattgaagtcggcactatcctctgcgttggtgaaggtgtacgcgcggtgcgcgatctgaaagcgctgtatccgcataaaatcgtgctggcggacgccaaaattgccgatgccggcaagatcctgtcgcggatgtgcttcgaagccaacgccgactgggtcacggtgatctgctgcgccgatatcaacaccgccaaaggggcgctggatgtcgccaaagagttcaacggcgatgtgcaaatagagctgaccggcttctggacctgggagcaggcgcaggcgtggcgcgaggcgggtattcagcaggtggtctatcaccgcagccgcgacgcgcaggcggcaggcgtggcgtggagtgaggcggatatcagcgcgattaagcgtctgtctgatatgggcttcaaagtgaccgtcaccggcgggctggcgctggaagacctgccgctgtttgccgggatccctgttcacgtctttattgccggacgcagcatccgcgatgctgcctcgccggtggaagcggcgcgccagtttaaacgctctatcgcccagctgtggggttaaggagcgactatgttggcgaaatccattccgctcggcatctatgaaaaagcgctccccgccggggagtgctggctggagcggctaaagcttgcaaaagcgctgggctttgatttcgttgagatgtctctcgatgaaacggacgcccgccttgcgcggctggactggagcccggagcagcgtctggcgctggtcaaggcggtggctgaaaccggcgtccgggtgccgtcgatgtgccttagcgcccatcgccgttttccgctgggtagtgaagacgacgcggtgcggcatcaggggctggaaattatgcgtaaagctattcagctggcgcaggatgtggggattcgggtgatccagctggcaggctacgacgtctattaccagcaggcgaacgatgagacgcgccgccgctttcgcgacggcctgaaacagagcgtcgagatggccagccgagcccaggtaaccctggcgatggagatcatggactacccgctgatgaactcgatcagtaaagcgctgggctatgcccattacctgaataatccgtggttccagctttacccggatatcggcaatctgtcggcgtgggataacgacgtccagatggagctgaaggcggggagcgggcatatcgtggcggtacacgtcaaagacacgaagcccggcgtctttaaaaacgtgccgttcggcgaaggggtggtcgattttgaacgctgcttcgaaacgctcaagcagaccggctactgcggaccgtacctgattgagatgtggagcgaaaccagcgctgacccgctggcggaggtggcgaaggcgcgtgactgggtgaaggcgcggatggcccgcgcgggcctgatggaggcggcataatgcaacagctgaaacagcaggtgttcgaggccaatatggatctgccgcgctacggcctggtgacctttacctggggtaacgttagcgccattgatcggcagcgtgggctggtggtgattaagcccagcggcatcgcctacgagtcaatgaccgtcgatgacatgtcggtggttgatctgcaggggcacgtggtggaagggcgctggcgtccctcctctgataccgccacccatctggcgctctatcgccgttatcccgaccttggtggggtggtgcatacccattcgacgcacgccaccgcctgggcgcaggcggggctggcgatcccggcgctcggcaccacccatgcggactacttcttcggcgatattccctgcacccgggcgcttagcgcacaggaggtggacgaggcctacgagctgaacaccgggcaggtgattatcgaagcgctgggtgaggccaatccgctgcatacgccggggatcgtcgtctatcagcacgggccatttgcctggggcaaagacgcccacgaggcggtacacaacgcggtggtgatggaagaggtggcgcgcatggcgtggattgcccgcggcattaatccgcagttgcagcccatcgatagctggctgatgaataagcattttcagcgtaagcatgggccaaacgcctactatgggcaaaagtagatagcgcgctccggggctttcacccctcacggtgaagcaactggtctggccccggggccgtttttaatcctgacgataggccgacggcatcacgcgcatgccgatgagcgtgaccacgcaaattatcgccccggcgtaaaacgtcgaggcggcgccgaaggtttcccacagtacccccgcgccggtgctggccagcagcagagccaggccactcatcagattaaacataccgaacgccgtgccgcgtagctccggtggcgccgtatgggcgaccatcgccgccagcaggccctgggtcattcccatatgaatcccccacagcgcgacgccgatcagcagcgtgctccagtggccgctgagcgccagcacgatatcggcgaggatcagcaccagcagcccccactgcagcagtttgctgtggctcatgctgtctgagagtttaccgaacgggtaagccgtgaggctgtagaccaggttcatcgccaccatcaccagcgggatggtatagagcgggatctccatctgctgggcgcgcagcaccagaaaggcttcgctgaagcgggcgagggtgaaaatgctgccgatcgcgaccacccaccagtaggcggcggagagctttttcaggttttcgcgcttcagcggattgctgcgtttgtgcgcgatggcggattttggctcctgtaggccgaatccgagcaggagaatggagagcacggcgggaatgaccgccacccagaaaatagcgtgaaaatcgttggcccagataaacatcagcagcaccgccagcagcgggccgagaaaggcgccgacggtatccagcgcctggcgtagtccgtaggcggcgccgcggatctccggcggggtgacgtcggcgaccagcgcatcgcgcggcgcgccgcgaatacctttgcctacgcggtcaatcatgcgggcgctaaacaccaccccggcggtaggggcgatggcaaacagcggcttactgagcgcgcccaggccgtagcccagcagcgccagtcctttacgcttgccgacatagtcgctgatcgcgccggagaagaccttcaggatcagggcggtggcttccgccagtccctcgataagaccgataattatcacgctggcgccgagggtagtggccataaacagcggtaagaggctgtggatcatctcggaggagacatccatcagcaggctgacgccgccgagtacccaaacgcctttggggatacggcctaaggtggcgaaacgcggaaccatcaatcactcctgattatcaaatggcgagtggctgattaaatcaggttgcgatgacgctggtaagtcggtttgtaaaataattctcaattgcgtttgggcgcagacctcgcttcgcccctcgcgaggagaggcgaagaatcgggcaggcgttagcggtatatcaccgcgctggcgcgaagcgggccgttggtttctggttcgtgcatcaggataggctgaaagtatttcgccccctgcgcatcgctcatctggctaagggcctgttcggcctcgtgctcagtggccatattgtgattgatatagataacgccgaggctctgcacgtcgtccatgttgcgggcctgacgttcggtgatttggatagctgccagcgcgttggcgctgaagaaaagcgcagccatcatggcgatgattttcagtttcatatactacgctcctgactgacagtcctgacgctgactcggggctctcctgtgatcgttgggctttgatagaagtgtaatcgctgcgcgttcatcgcatggcgaccttttctgatgcagttgttcaaaaaaatgccgcttcctttattggttaattttaaatcacccacttagcccagcttggcgcttagtgcgaattatttgtgcaaatgcgcttgtgttcctgaggggccgccattagaatgacgcgtcaatttttcagccgccctttaacacgttccttgcctccatgggccgcggctgacccagacaggaggctgaataatccgtaaggagcaattcgatgcgtcattacgaaatcgtttttatggtccatcctgaccagagcgaacaggttccgggcatgatcgaacgttacactggtgcaattactgcagcagcaggtacgatccaccgtctggaagactggggccgccgtcagctggcttatccgatcaacaaactgcacaaagctcactacgttctgatgaacgttgaagcgccgcaggaagcgatcgatgagctggaaactaacttccgcttcaacgacgccgttatccgcagcatggtaatgcgtactaagcacgctgttaccgaagcatctccgatggttaaagcgaaagacgagcgccgtgagcgtcgcgaagatttcgccaacgaaaccgcagatgattctgaagctggggattctgaagagtaatcctgatgaccaaccgtctggagctgtccggcattatttgcaggactccacttcgtaaggtcagcccgtcaggaattcctcactgccagttcgtgcttgagcatcgttcagtgcaggaggaagccggttttcaccggcaggcatggtgtcagatgcccgttattattagcggtcatgagaaccaggccattactcacagtataacggtcggtagcgcagtaaccgttcgagggttcatctcttgccataaggcaaagaacggcttgagcaaaatggttctgcatgccgagcagattgaattgatagattctggagactagccatatggcacgttatttccgtcgtcgcaagttctgccgtttcaccgcggaaggcgttcaagagatcgactataaagatatcgctacgctgaaaaactacatcaccgaaagcggtaagattgtcccgagccgtatcaccggtacccgtgcaaaataccagcgtcagctggctcgcgctatcaaacgcgctcgctacctgtccctgctgccgtacactgatcgtcatcagtaatcggtcacggtccattaatacgactttgagaggataaggtaatgcaagttattctgcttgataaagtagcaaacctgggtagcctgggtgatcaggttaacgttaaagcgggctatgctcgtaacttcctggtcccgcagggtaaagctgttcctgctaccaagaaaaacgttgaattcttcgaagcacgtcgtgctgaactggaagccaaactggctgacgttctggcagcagctgaagctcgtgctgagcagatcaacgccctggaatccgtaaccatcgcgtctaaagctggcgacgaaggtaaactgttcggttccatcggtactcgcgacatcgctgacgctgttactgcagcaggcgttaaagttgctaagagcgaagttcgcctgccgaacggcgttctgcgtaacgttggcgagcacgaagtgaacttccaggttcacagcgaagtattcgctaaagttatcatcaacgtggttgctgagtaatcggcctctgacgttctggtaacaacaaaccgccggccttgtgccggcgttttgctttttagcgcctttcattttgcggcggcgtaacgcttgctgtcgtcttctctgctatcgcgcacgcacaaagctgccgttcgactggcgggtaaacagcacctgctggccgttgccggtatcgatagtgagcccggtgaccacgccgttggcgttctgccgaatctgcaccgtctgtccgctctgcaaagtacttagcggcttgccagcgccttcaacctgcgccatggcgtagacgtcagtggccggcagcccatgatcgcggaacagctgcgccagggttttgcctgactcgatgcgataggtccgccattgctgctcaatacccggcgcggactgctgtgatgaggattgataaggctgggtggcggcgggctgctgcgtctgcgcttgatccggctgctcatcctgaatcggctccgggcgaccggcgccatctgatcggcgtcgctcacggtaggcgtattagtgatcggcggcagcggaacggcctgattgccgccagcttgcggctgggactgcgactgtagattcaggttcgcttcacggctggtcgacgccgggctttggctatcatcggagggaagcagaataccaataataaccaacaggaagccagcgataattccccggcggtgcatcggaggcagcgggtccaggaggcgaaaatgatccggggcgtgccagattttcgccagggtagatgtcagttcaaagcgcccgggcatggctttcctcctgctccgcatatttatatcctgctcatgagtatagatggctaacgtcctgatgaccggaacaaagtgaagttaacctgctgccgcctattgtttctttttcgctgagatttgtcatcatccgccgacaaagttttacccatttcgctatggctgttatgctttcgcacgcttttatcttgatgtttatcacccaaaaaggaacaacgatggcaaccccaacttttgacactatcgaagcgcaggcaagttacggtatcggcttgcaggttggacaacagctgagcgaatccggcctgcaggggctgctgccggaagcgctggtggcgggtatcgccgatgcgctggaaggtaaccagccgcaggtgccggtggaagccgttcaccgcgcgctgcgtgaaatccacgagcgtgctgacgctgtgcgtcgcgagcgttttcaggccatggccgctgacggccaaaaataccttgatgaaaaccgcgagaaagaaggtgtgaacagcaccgagtctggtctgcagttccgcgtactgacccagggcgaaggcccgatcccggcgcgtactgaccgcgttcgcgtgcactacactggcaaactgatcgacggcaccgtcttcgacagctccgtcgctcgcggtgaaccggctgaattcccggtgaccggcgtgatcggcggctggattgaagcgctgactctgatgccggtaggttccaaatgggaactgacgatcccgcacaacctcgcctacggtgagcgcggcgctggcgcatcgattcctccgttcagcaccctgatcttcgaagttgaactgctggacattatctaaacagcagcggcttcctcttccccgcggcaggggaagccataaaaatagcgtaaaatccttaagttaaaaattaattggaattatgttttgcattcatcacgtatgggtgtatttttgtgagctatttcgcgttagatgagtgatataacactcactttaaacataaaattaacattatatctaaatcatagtattcatccctccgattcttacctaatatcgactagcccttgctggggttaatgacagacgacgggccatcagagcctgaacaacacagacaggtacaacaggaagaaatcacatggtagatcaggttaaagtcgctgctgtcgagcaggagccgactgaacaatcgctacggcgaaatctcacaaaccgacatattcagctgatcgcgattggcggagcgatcggcaccgggttatttatgggttctggcaaaaccatcagccttgccggaccatccattatctttgtttatatgattatcggttttatgctgtttttcgtgatgcgtgccatgggcgaattactgctgtcgaacctcgaatataaatcctttagcgacttcgcggccgatctgctggggccgtgggcgggctactttaccggctggacctactggttctgctgggtagtgaccgggatggcggacgttgtcgccatcaccgcctacgcgcagttctggtttcccggactctccgactgggtcgcctcgctggcggtgatcctgctgctgctgggcctgaacctggccaccgtcaagatgtttggcgaaatggagttctggttcgcgatgatcaaaattgtcgccatcgtggcgctgatcgtggtcggcctggtaatggtggtgatgcatttcaaatcgccgaccggggtcgaagcctctttcgcccacctgtggaatgacggcggctggttcccgaaagggctgagcggcttcttcgccggcttccagattgcggtgtttgccttcgtggggattgagctggtgggtaccaccgccgccgaaaccaaagacccggaaaagtccctgccgcgagcgattaactccatcccgctgcgtatcattatgttctacgtcttcgcgctgattgtgattatgtcggtgacgccgtggagctccgtggtgccgagcaagagcccgttcgttgagctgttcgtgctggttggtctgccggcggcggcgagcctgatcaacttcgtggtgctgacctccgcggcctcctcggccaacagcggcgtgttctctaccagccgtatgctgttcggtctggcgcaggatggtcaggcgccgaagatgttcgccaagctgtcgaagcgtgcggtgccggcgaagggcttaaccttctcctgcatgtgtctgctgggcggggtggtgatgctgatggtcaacccgagcgtgattgccgccttcaccatgatcaccacggtgtcggcgatcctgtttatgttcgtctggaccatcatcctttgctcttacctggcgtatcgcaaaaaccgccctcagctgcatgagaagtcaagctataagatgccgctgggtaaagtcatgtgctgggtgtgcatggccttcttcgtctttgtgctggtgctgttgaccctggaagacgatacccgtgaagcgctgatggtcaccccgctgtggtttgtgctgctgggcgcgggctggctgtttgccggcaaaaaacggctggcgaaataaacgaaaattttaacgttgcttgcaacggcccgtcataaaaaaggccacccggagtggccaaataagacggacaatgtcgagggcgcccgcgggcgcctttttctttactttccgccgagggcgcgcgggaacagcacattattttccaggctgatgtgttccatcagatcgtcgatcatctcgttgataccgttatacatcgccttccaggtggtacaggcttccggcggcggcgtcacgttgtgggtgatgtgcttaatgacttccagcagttcacccgcttcatcatgctcgctttccatcacgctgatcggccccccggcctgggcgcccattccctgtttgatcatcgggaacaggatctgttcctctttcatcatgtggctggaaagctcctgatgcagcatggtcaggtacttagtcagtcctttcggtacgttcggtttatcggcatggacgcgttcaaccttggtggcctgcaggatcagctccggcagctgttcacggtgccggtcgtgatagcgaacgatgatatggtcgataatctccgcgaggggcgccgcgcgccagtcgcgggagagaggctgttcggccagtttcgccagctcggcttcaatcaccgcgacatccagcgctttgcgcgacgcggcgcgcgccagggtctgtttgccgccgcagcagtaatccatatcgtattgacggaacagggcggaggcgcgcgggatggtcagcgccagctcgcctaaaggttggtcacggaaagccatagcagttacctcgtcatcaggaatataagatgtattttaaatgcatctttttggcgagggaataccccttaaggaggcgaggctactttttttcgtccgccagcggctgcagcatcggtttttccggtctggcgcgtacggcggagaccacgccgagcaccagcagcaggatgccgctcagggtcagcagcggcggtaagctttgccgcagcaggaaggtatacagcagtccggccagggtttcgaagacgataagcgggccgaggatcaccgtcggcagccgctggctggcaatattccagcatagcgcgccgacccatgagcagagcaccgcgatggccagcatcagcgtaataaacaccgccggacgcgggccgaagggcaggggaaacccggcctgctgaccgtgcagccaggcgcaggcggcgagatagccggccagcgaaaccggaagcgtcaccagcgcctgagcggtagcccacatcattggcggttgatgcgggttctcccgcagccagcgggcgttgcgcagagcataccaggcccagcagaccaccgatcccagcgccagcgcaatgccggagccgtagcgccacgggctaaaattcggcagcccctgacgcagctccgcgacgttaacgcagatcaggcccacagcgatgcagatcagcgccggaaacaggcgccgccacggcagcttcccgtcgcgctggctgtagagcagattggcgaacaccggcagtaccaccggcagcgtgccgataatcatggtggaaaccggcgccccggtgcgctgaatggcgctggccaggcagacgtaatagataaggttccccatcattgtcaggcccagcgcggtccaccagtcgtgccggctcaactggcgcagtcgcgcgcgcccgagccacgccagcggcagggcgatcaggcccagcgccagatagcgtcccatcgactgcagcatcgccggatactctggcaccagcaaaggcccgacgaaaattaaaccccacatcagccccgccagcagggcgtataacacaccactaatcatcattgcatccgttgtcattaccgttgtctgcagtgtagaagggggtcgggcaggaatattgtatgagattgcgcattagcgcctggcgacctgcttctgatagcgcaccggcgtaatgccgtaacgctgggtgaaggcgcgggtcaggtgggactggtcggtgaggccgacggctatcgccacttcggcggcgggcatgccgtgggtgaggaacgctttggcgcgccacagacggatggccatcagcatctgatggggcgttacgtgatagtgggctttaaactggcgctgaaagtggtacgggctcagcgccgccacctgcgccagctcgtcgagggtgatgggacgcatatagttatcgtgcaggtagtcgcgcacgcggtcaaagcgatgcccggcctcaccttgcgcagaggcatggtgggccagagggcggaaggcgtcgatgaggtcgagcagcagtccctgctgggccagcggatcgtcgctatgccacaggccataaatcagctggccaatttgtcgggaacgcaggggatcctcgcggaccacctcgctgaaccaccagtctcgcaccccggtgatggcttcaagacggtccggctccagataaatcatccggtagcgccagccgtcggcggtttccgcttcgccggtgtgcagctcgtcgggattcatggtgacaatggagtttgcggcggcaatatgctgactgccgcggtagcgaaagcgctccgcgccttgctcaatcacgccgatgccgaaggcttcgtgggtatggggttcaaaggcgtagcgggatatatgggcgtggtaaagctccaccccgggcaactgttcgagatggcgaaagcgcgcgcggtctttttcatcactaaattggagtggtacgccctgcatgcctgcctcccgacggttatcccttcaatatgggagaggaaccgccgggacgcaaccgcaaaagctgagaggggcggttacagaatgcctttcacgctttcagcaagggaggtggtcgggcggccgatcagcgtactcagggtgcggctgtcgtcaaacagtccgcctttcgacgcgccgacatcggaatccgccagcatatcggcaagcccggccggcaggccgacgcttttcagcgcggcggcgaaatcggcttcgctgaggttctggtagaccacgtttttcccgctttgcttgctcagctcggcagccaggtcgctcagcgtccaggcgttatcacccgccagttcgtaaattttgccttcatgaccctcactggcgataacgcgggcggcagcggcggcataatccgcgcgggtggcggaggcgattttaccctcgccggcggcgccgataaacacgccatgctccagcgccggcggcgcgctggccagatagttttcggtataccagccgttacgcagcagggcgtaagcgataccagagtcggccagcatctgctcggtttcgatatgctctgcggccagacccagcggcgaagtgtcggcatgcagcaggctggtatacgcgatgaatttcactccggcggctttggcggcgttaatgacgttgcggtgctgtacagcacgctggccgacttcgctggaggagattaacagcagtttatccacgccctgcagcgcggcggtcagcgccgcttcgtcgctgtagtcggcctggcggacaaccacgccctgctggctgagcgcctgggctttggccgggttgcggacaatcgccacaatctggctggcagggacggtgttaagcaggtcttgcagaacgtagtggccaagctggccggtggcaccggtaagagcgatcatgggtcttctccttcgtgtttattggcagttgtggtaagctaccaccttaactaacttttagtaagtacgtacaaaaaggtaagtgtgaaatggccgaaccgacgctgagcgagaaattgcgcaccggcaatttgtttgcggaacagtgcccgtcgcgcgatgtgcttaaacatgtcaccagccgctggggcgtgttgattctggtggcgctgcgcgagggaacccaccgtttcagcgatctgcgccgtaagatgggcggggtcagcgaaaagatgctggcgcagtcgctgcaggcgctggagcaggatggttttatcgaccgcgtctcttatccggtggtgcccccgcacgttgaatatagcctcacgccgctcggcctgcaggtgagcgagaaggtggccgccctggcggactggatcgaggttaatctgccctcggtgctggctaaccacggggagtgaaaatgtatcactccctgtagccccggtaagcgcagcgccgccggggaacaggcattacttgctcaaatccagctgataaatggcgaagccgatatcatcggtggccacctggcgcattggatactgcgctttctctttgataaacgccgcggctttgtcgccaggcgaggtctcaaaacgaatatccaacggcgtgttgctgtggatcggcgccagacgccagttgttatccgccgccggatggatcgcgccttccttcttcgattgcgcgccaatccacgccgccagcaccgaacggttttcatccggtgaggcgaaggcgatatggctctcaccggtgccggcgaatttgccgccgtaagcgcgatagttattggtcgcgaccaggaaagtagcctgcggatcaaccggttttccattgaaggtcaggtgcttaatacgctctgcctgcggatggatcatctgacattcgccgtcgtagcgggccggctgagtgacgtcgatctggtagttcaccccgtcaatgacgtcgaagttgtaggtgcggaagccgtcccagttgatcagcgactgcggcttgctgctggcgggatcgatctggttaaactgtccggcagagcattccagccactccttaacctctttcccgctgaccttcatcaccaccagggtgttggggtagagatagaggtcggcggcattgcggaaggtgagctggcctttctccacttcgacaaagctcgccggatcgtttttacgcccgccgactttaaacggcgcggcggcggagagcaccggcagcttcgccagatccgggtcgccctgaatatagtgttctacgtaggctttctgcgccatgttgaccacctgcaccgtcgggtcgtcctgcaccagcgccagatagctgtacatgttgtcggcggacttgccgatcggcttgctgacgaattcgcgagtggcgtcatgatcggctttcagcaccgacaccagcttgccatcttcggccgccagtgatttcttcgccaccgcgtcatagattggccgcgcttccgctttactctgagttacctgccatttaccgctgtcgttatttagcaccagatcgaccaccccgagatgatcgccccacattcccggcatcaccgccggtacgccgtttagcgtccctttggcgatatccgcgcctttgatgttggcgaagtctttacccgggaacaccgcgtgggcatggccgaacataatggcgtccacgccgggcacctggcttaagtagtaaaccgaattctcggccatcgcctgatacgggtcggcggagaggccggagtgagcgaccactaccaccacatcagcccctttcgcccgcatctccgggatatatttgcgcgcggtttcggtaatgtcattgaccgtcaccttgccgttaagattagctttatcccaggtcatgatctgcggcggcacaaagccgatatagccgatgcgcagggtgtggatttgaccgtcgctgtccacgacccgggtatcctggatcaggtacggcgtaaacatcggttttccggttttggcatcgatgatattggcgttcacgtaggggaacttcgccccggccagcgccttgtgcaggaagtcgagaccgtaattgaactcatggttgcccagattgccgacggcgtaattcagggtgttcatcgccttatacaccggatgtacatcgccctctttgagcccttttgccgccatatagtcgcctaacgggctcccctggatcacatccccgttatccaccagcacgctgtttttaacttctgcccgcgcctgttcgatcaggctggcggtacgcaccaggccgaatttctccgtggcggcatctttgtaatagtcgaagtccatcatattgctgtgcagatcggtggtttccatgatccgcaggtcgaccgtcgcggcgttgacgctggcggcgatcagcgtggccaggagcgttgcgctaaacttaatcatcagaggcgtccttttttatgagcgatagcacagaagaaaatgtatttatattctgttgcttacagaaatgtgaatcttgccagaaaagcgggcagagaaaccgccatcgttatcacagatagcggaactcgcggtgatgcgatataaataaaacaacgagttaacgccactgtaaccagacgaggtggagaatgttagaacaagtatgtcagcttgcacggaatgcgggcgatgccatcatggaagtctacgatggaaaccagccgatcaacgtcgccagcaagaaagatgattctccggtcacggcggcggatatcgcagcgcataaagtcattgtcagcggcctgcaggcgctggatccggataccccgatcctctccgaggaggacccgccggcgtgggaagtgcgccagcactggcagcgctactggctggtcgacccgctggacggcaccaaagagtttattaagcgtaacggcgaattcaccgtcaatatcgcgctgattgaaaacggcaagccgacgctgggcgttgtctatgcgccggtgatgaaggtgatgtacagcgcgcaaaatggcaaagcctggaaagaagagtgcggcgtacgcaagcagatccaggtccgcgatgcccgtccgccgctggtggtgattagccgctcccacagcaacgatccggagctgcaggagtaccttgagcaacttggcgaacaccagaccacctcaatcggttcgtcgctgaaattctgcctggtggcggaaggtcaggcccagctctatccgcgcttcgggccgaccagcacctgggacactgccgccggccatgcggtcgcggtggccgccggggcgcatgttcacgactggcaggggaaaaccctcgactacacgccgcgtgaatccttcctcaaccccggcttccgggtctctatttattaagcaatttatgcagcaggtcgatcacctgctgcacctcttgttgggtgagggcgccgtctttagcccactgcacacgcccgttcttatccagcaccacgatcgctgagctcttctcgtccagctgccaggccttccgcaccaggccgttgctgtcgacgataaattgcgaccatgggaagagctttttattactttcaatgctgttgcgtacaaacatcccggtgcccgggatggcgtcgtcagtgtttacaatggtggtggtctgatagcgatcgtgcgggaagcccgccgctttaatcgcctcgatcaggttggcattcttctcttttgctgacgagcgtccggcgatgtgctggaccacgcgcacttttcccgccagctgggcgctattccagtttttatagctaaacttatccttatccagaataagctctccccgatccgcgacgccaacgggcgccacgcgctggccgtcgacgaagttatgcgctgtggccagcagcgggagaagcagtaacgaggcggccagtatgctacgtagggtcatgcgcaatccttaatcatttttatgcaggtgatccgaccacttggtctcgtttaatcataagtgcgattggcggtgattacccgcaatgaggatgccagtttgcgtgttgacgcacaaattagtcgtaaaacggcgacttatacttacttcatcgtatgtctgaaacgaaaattctgaattattgtcatcaaagggtaaataaacttatacatactgggtccctctgagattctggactatagttttagggcattaaaatttgcgctcccaagacgtgggctaactgtggcaccacaagagcgtaaccctggcaggagagaagaatgaaaattttccaacgctacaatccgctgcaagtggcgaagtacgtgaagatcctgtttcgtggacggttgtacatcaaggacgttggcgcatttgaatttgataagggcaaaatccttatcccgaaggtcaaggacaagctgcatctgtcagtgatgtccgaagtcaatcgtcaggtgttgcgtctgcaaactgagatggcataacctggcacgtagcagtacgtagtaggtaaaagacggctcccgatgggagccgttgatgtttttagcccttcatttccgcatagcgtttgcgatattcgcccggtgggatgccgttatgtttacgaaacaagcgggtgaaatagaccggatcgctgtagcccaccgataaagcaattttgttaagtgggagcgaagtgctctgaataagccacctggcgcggttgatgcgctgcgtttcccgccacgcatagaccgtttgccccagttcatttttgaaaaggtgcgccagacgtgaaggggagataaacaccatcgccgccagagtctcgatttttacctcctgcgcaatatgggcgttaagatagtcacagatggcgttaatccgagggtcgtgggcatggcggttgctaatgggttgctgttgaaaacagcggagaattaatctctccagcgcgttcattgccagcgcttctgacagcggtacggacgcagagtggtggcgtatcacttcgtagaacagatcgcgcagttgctggagctggtcgggatcgttaatggttgttttgccgataccgtgggtggtttggtcccacttcagccagtctatccagtaggggcgggggataaagtagatccacagatggtcccagtactcgctgtgttcgtccctgccgtaatgatggggcacgccgggaggaaacagcaacagatcgttttcccggcacagcaggaagccatcgcccgctttcgcccgcgcctggccgcgcagggtcagattaatgatgtaacctttcatcccctgcgggcgattaatgtagtagtccagcgtggagccgcgggtaatcggcgtgaagcctgcgacgacccaggcattgaaggtaaaggtcttcatcaatggcgagaaattgagtagctcattgatatccagttccattctctcttccacctgagcgccgccgcgtcgttagctttcgatgatagtaaattcccaggccctgaggcgcaacggctggccgacgtatactgtctccccgctcagcagcgcggtacccagggtctcgctgacaacatccatcgcctcgccggagtaattgaacaggaagtggatattatttccggcgcggttacgcatctttttaaccactaacggatagcgataggcggaagttcgcgagttcagcgtgagatccgccgtcaggacatcaaacagctggctaatcaggcccttctgcggcagaaatccaacgtacagggcgcgaccctgaccgtaatccgcctccgttgcggcggcgtattcgccccatgccgggtgctggtagcgcagcagggtgcgggtcccgtcatcgggcgtcagcaattccatccacagctcagcctgattgtcattgcggcaatcaatctctgcgcagcaagagcttaccgtcgtctcttccggcagggtgaactggctgtagctgacgccgcagctctggcgcaaaacccccggctgcgcgctgctgcgcaccttgacgttttcatcgctaaagcctgatttaaagccgatcagcgctctgccgccccgggcgatatagtcgttaatccgcgttagcaggccctcatcggcggcgtacagaccaggaacgatcagcacccggtagcgcgaggtttcctcgttcacatcgtggatgatgtcgaggctgatattgtggtcatacagcgcatcgtggaagcggcggaagatatcgttataaatgttgcccctggcgtcgccgggaaggaagtgattgagagcgtccatcgcctcattacttattagcaacgcgacgtcattttcggccttcagctccgccagctgcggggacaggcgggcgaaatcggcgccgatggtggtagcttcctgccaggttgggttgcgcgagaagtcgtggctgagcagccccttccagtaggtttcaaaggcgttatgaatcgaatgccagtgccagtaggagaccatggcggcgccggaggcgatatggctgaatgcctgcaggcgtagctggcccgggaagggggtccactgggcgaagccctgagcctgggtttccagcacgaagtagttctggcccggcttaagcgagcgggtgatggcgccgccaaaggcgatttcccgtccggtcaggtgtgcctgactcgggtgatagatatcgacgccggcgatatccagcgcctgcgccgccgcaaaatggtcgacccgcggctgcacgccgtaagagtaaccgcgccattcgaaatcgaagttgtgggtgacgaactggtgcggctgggcgtattcccgaacgatggccgcctgccaggccagatactcggtgacctgctgacgctgatagcgggagaaggcgcaggcgaggctggcgttgatggtgttttccaccggcggaaaatcctgccagcggtcaatgcggttgctccagtaatccaggccgaaatcgtgattcagctgcctgaggtcaggatatttctcctgcaggctgcgcacgaagccctcctgcatatagcggccaatattgtcgtaatgcttggtttcgttatccagttgccagccgataatcgccggatggtgttgcacatgggccatcagcgtgcggataattttttcggcatagcggcgaaaggtcgggttgacgatatccatgatctgccgcggaccatatttttgctgccccgcgacggtggtgaccagaatatcgggatgtttcgccgccagccaggccgggaccgcgtaggtgggcgtcccgacgatgaccgcaatgccggcctcatgcatcgcctccagcacccggtcgatatggtagaaattatactggccctcttcaggctccagcgtactccaggtggactcggcaatacgcaccacgttaatgccggtttcgcgcattaaggcgatatccttagccagccgatcttccggcatatattcatcgtaatacgccacgccataaaataaatgagacatacacactacctcctacattaattcgcgggcaccggttgtgaagagaagacacgcgctttatccagcgtaataaaagaaataagcgtgaagcacagagcgataccgccgagtacgatatagctactggtaaagcccatgctctggtacatatggccgataccggtcgagagaaaaatagagctaaagcttttcgaaaattggaagccaattaagtaaacggtcgctgacagcagaggattaaagttagccgtaatatattttaatgccgcgacaagtagcaccgagctttcaaaaccgtggaggagtttaatcagactgatggagacagggccaatagcccacgcggagccgataatacgcaagctcataatcagcccgcagtataacagcgcatttttcgggccgattttattcacaaaccatggcgcaaagaacatcacgatggcatcaaggaaaatctgacccgtggttaaataaccgaagacttctgcaccccgggctttactctcaaagaaatggctgtaatagatagcgaactgctggtcataggtttcatagaccgccccgacgccaatgacatagagggcgaagaaccagaattttttaatttttaacagcgagacggcatcgcggagggtaaccggcgatgctttgccggacagccgcccctgctgagggtgggcgctgatctgcattttccagacaatcgccataagacagacgcctgcgccgctggccaaccagaaaatcatattctgatcaatgccgtagagttttcctgccgcaaaggtaccgatcgcagcgccgatgccaccgaacatccgcgcccgaccaaattcgaagccggaggcgcggctgactttatcaatgtaggcttcgcaaatcccgcagccggcgccgtaggccatgccaatataaaggccgccagccagcgcgccgaagaacacatttatttgtaacaggggagcaaagacataaatccagtaaggggcgaataacgtgataataatcgccagcatccacatcagattcttacgatacaccagtttatcggagatgaagccgaataatggctgaacgcagacggcgacaatggcggtgaaagaataaaccaggccgacgtctgtgtagttaataccgatggtttccgtcaaccacagggataaataagggtagcagcatccccaacctataaagaagaacaggaaaaacagacagctgataaagtaatttttatttgacgttatcatggtaaccctcgcttcctttattcaggaatatgatcgtgttgatgcgagcaacgttacctttttgcgcgtcggggagtcatgaacgtttcgctatcgagcaggagtaatctgctatcggcagaggggcgtgagccgcttcacattcgagccataaaaaagggcggatggtcatccgcccttaggagagagaaaagattacgctcaggcgttctggctttccgccgtttccgcctgcttcggcaccagcaccgttggcttgttatcgatgcgggtcaccagcagctggtcgatacggtagttatcgatatccacgacctcaaacttatagccggagaacttcactgcgtcggtgcgtttggggattttacgcagcataaacatcataaagccgccgatggtctcgtaattcccggactgcgggaactcgtcgatatccagcacgcgcatcacgtcatcaatcggcgtaccgccatcgatcagccacgagttttcatcgcgggcgacgatctgctcttccagcccctggccgacgaggtcgcccatcagggtggtcatcacgtcgttgagagtgatgatcccgaccaccagcgcgtattcattcatgatcaccgcgaagtcttccccggcggttttgaagctttccagcgcttccgacagggtcagggtgtccggcacgatcaacgtgttgcggatctgtacgccgccggtcagcaccaggctctggttcgccagcacgcggttcagcagatcttttgaatcgacgtaaccgataatgtggtcgatatcttcattacagacgaggaacttcgagtgcggatgttcggccactttattcttcaggctctgctcgtcttcgtgcaaatcaaaccaaatgacgctttcacgcggggtcatggaggaaggaacggtgcgggactccagctcgaacacgttctcaattagctcatgctcctgcttgcgcagcaccccggccagcgcgccggcctcgaccacggcatagatatcatcggaagtgatatcgtctttccgcaccatcggcagtttgaagatgcggaagatcatgttggccatgccgttaaacaaccacaccagcgggcggaagactaacaggcagaagcgcatcgggttgatgatgcgcagggccactgtttcgggcgcaatcataccgatgcgtttcggagtcaggtcagcaaacaggatgaacaagctggtgaccagggtaaaagagatgatgaagctcagctgctcggagagctccggcgacaaatacccgctgagcaggctatgaaacgccggtgagaaagccgcgtcgcccacaataccgccaagaatggcgacggcgttgaggccaatctgcacgacggtaaagaaggtgcccgggttctcctgcatcttcagcacccgctgtgcgttgacgttgccttcatcggccagcagtttcagtttgattttacgtgaggctgccagtgaaatttccgatatcgaaaaaaacgcactgacggctatcagacagagtattactaaaatactgtttaacatatcttttctgaccgttgaggccagatcctcggaagggaagttgataactcaaatgtggaatacataaaaaaccggtccgaaggcgctggaccggctgtcacactggctagtatagcgtaagggaatgtaaagccgccagagcgttcattgaccgcctcgctgttgaggcggaaatcagaattacgcttgaggcggcaggcagacgccaatgccgccgatgccgcaatagccgtgcgggtttttatacagatactgctggtgatcgtcctcggcatagtagaacggtttggcggtggcgatctcggtggtgatgtgacgggtatcgtgcgcgtcgttcatcgccgcctggaagcgcgcgaggctggcctttgccgcctccgtctgttccggggtcagcgggtaaatcgccgagcggtactgggtgccgtggtcgttaccctgccgcataccctgcgccgggtcgtgattttcccagaacacctgcaataactgctcatagctaatcacctgcggatcataaaccacgcgtaccgcttccgcgtgaccggtctggccgctgcatacttcgcgataggtcggattgggcgtatagccgccagtgtaacctgcggcggtgctgtaaacccccggcaattgccagaacaggcgctcaactccccagaagcagcccatggcgaacagcgccacttccatccccgccgggacgttggtcatcgagtggccgttaactgcgtggagcgtcgccactggcatgggggtattgcgtccaggcagcgcatccgcctgggcgacaagatgcgttttatcaaatagactcacggttggcctctcaatacagaaatcgtcgttaaggttgtaacgaagcgtgtcttttaacacaataaatacgcgtaatacgtctagattaatacataagaattatttgggttattgccactttttcaaccctatgttgttagggttttgttaagccgtggagcggcgccagtgtttcctgtagaggaaacagggatattcaggagaaaatgtgctaaaaatccgccagttatgtgtcaccagccttttgctggtcagcggggtcgccagcgcagcgaatgtgcgtttgcaggttgagggattatccggggagctggagaaaaacgttcgcgcccagctttccaccatccagagcgatgaagtcacgccggatcgtcgctttcgcgcgcgcgtcgatgacgccattcgcgaaggtctgaaagcgctgggttattacgagccgacgattgaatttgatttgcgtccgccgccgaaaaggggacgtcaggtgctgatcgccaaagtgaccccgggagaaccggtgcgcattggcggaaccgaggtgattctgcgcggcggcgcccgcaccgatagcgactacctggcgctgctgaaaacgcgcccggccatcgggacggtgctcaaccacggggattacgacggcttcaagagctcgctgacccgcgtcgccctgcgcaaaggctactttgacagcgagtttcttaagagccagctcggggtctctctcgaccgtcatcaggcgttctgggatatcgattacgacagcggcgaacgctatcgctttggccacgtcactttctctggctcgcaaatccgcgatgaatacctgcaaaacctcgtgccgtttaaagagggcgactactacacctcacaggacctggccgagctaaaccgccgcctggcggcgaccggctggttcagttcggtggtggtggcgcctgattttgctaagtcgcggaaaaccaaggtgctgcctctgcagggcgttgtctcgcctcgcaaagagaacaccgtggaaaccggggtcggctattccacagacgtcggtccgcgagtgaaagccacgtggaaaaaaccatgggtcaactcgtatggccacagcctgacctccagcgtcagcctctccgccccggagcagcagttcgactttacctataaagtcccactgctgaagagccccctcgaacagtattatctgatgcagggcggttttaagcgtaccgacctcaatgatacccaggccgactctaccaccctgggggtctcgcgtttctgggagatgtcgagcggctggcagcgagcgattaacctgcgctggagcctggatcactttacccaggcgaacgtcaccaacaccaccatgctgatttatcctggggtctcggtgaaccgcactcgctcccgcggcggcctgatgcctacctggggcgattcccagcgctactcggtggattactccaacaccatgtggggctcggacatcaacttcatcgtgatgcaggcccaggacgtctggatccgtaccctctatgaccgccaccgctttgtggtgcgcggcaaccttggctggatcgaagcggacaactttgacaaggtgccgccggatctgcgctttttcgccgggggcgatcgcagtattcgcggctataaatacaaatctatctcgccgaaggacgatgacggcaagctgatcggggcctcgaagctggccaccggctcgctggagtatcagtacaacgtcagtggtaaatggtggggcgccgtgtttgtcgatagcggcgaagcggtcagcgatattcgcgagagcgatttcaaaaccggcgccggggtaggcgtgcgctggcagtcgccggtggggccgatcaagctggatatcgcccggccgatcggcgacaaagaagagcatggtttacagttttacatcggtctggggcctgaattatgagtttatggaagaagataagcctcggcgtcttaatcgtgttggtgctcctgctgggaaccgtcgggttcctggtggggaccaccaccggcttgcatctggtgttcaaggcggcggatcgctgggtaccggggctggaaatcggcaaagtcaccggtggctggcgtgatttaaccctcgataatgtccgttacgagcagcccggggtggcggtcaccgccggtcagtttcacctcagcgtcaggttgcgctgcctgtgggacagcagtctgtgcgtaaacgacatcgcgctgcgcgatatttacgtcgccgtcgataccaagaagatgccgccctcagcgccggtcgaggaagaggacagcgggccgctgaatctctccactccttatccgatcaccctcagccgcgtcgcgctgcataacgtcaacgtcaaaatcgatgataccgcggtctccgtacgcgacttttccaccggcctgaactggcaggagaaaaatctgaccctaacgccgacctcgctgcaggggctgctgatcgccctgcctaaggtggcgaaagtggcgcaggagcaggtggttgagccgaaaattgacaacccgcagccgcaggaaaaaccgctcggcgagacgatgaccgacctcttctcgcagccggtgctgccggcgatgaccgatgtccatctgccgctgaacctcaatattcaggcgttccgcggcgagcagctgcgcctgaccggcgataccgatatcaccgtgtataacctgctgctgaaagtcagcagtatcgacggccagatgaagctcgacgcccttgatatcgactccgatcagggcaaggtcagcgcctcgggcagcgcgcagctgcaggataactggccggtggacattaccctcgccggaaccctgaacgtcgacccgatgaaaggggagaaggtgcagctggaggtgggcggcgaagtgcgtaaaacgctcaaagtcggagtggacttaagcgggccggtcgcggccacgctgcgcgcggatgcgcagctggcggaggccgggctgccgctcaatatggaactgaagagtaagcagctcgcctggccgttcagcggcgagaagcagttccaggccgacgatgtccagctgaagttcagcggcaaaatgaccgactatgcgctggacttctccaccgcggtgaaaggtcaatcgctgccgccggcgaaaatcgccctcaacgccaaaggcaatgaacggcagatcaatctcgacaagctgacggtcaatgccctggaagggaaaaccgagctgaaggcgctgctcgactggcagcaggcgatcagctggcgcggcgagctgaccctcgacggcatcaacaccgccaaagaggtgccggactggccgtcaaagcttaacggccggatcaagacccagggcagcctgtacggcggcagctggcagatgtcggtgccggagctgaaaattaccggcaacgtgaagcagaacaaagtggatgtggcgggctcgctgcagggtaacagctatctgcagtggaaaatcccgggactgcatctggcgttaggcccgaacagcgctgatatcaaaggcgagctgggggtgaaggatcttaatctcgacgccaccatcgatgcgccgcacctggataatgcgctgccggggctcggcgggacggcgaagggcttggtaaaagtgcgcggcactgtcgatgcgccgcagctgctggccgatatcaccgcccgggcgctgcgctggcaggagctgaccatcgcccaggtcaacgtcaaaggggatgtgaaatccaccgatcagattggcggtaacctggacgtgcgggtggatcgcatcagccagccgggggtcaatatcagcctggtgcagctcaatgccaaaggtacagagaaacagcatgagctgcggctgcgcgtgcagggcgatccggtttccggccagctggcgctggcaggcagcttcgatcgtcaggccgaacgctggaagggctcgctgagcgatacccgcttccagacgccggtggggccggtagcgctgacgcgcagcattgcgctggactatcgcaatctggagcagaaaatcagcatcgggccacactgctggaccaacccgaacgccgagctctgcgtgcctgaaaccattgacgcgggcgccagcggacgggcgcgggtgaatctcaaccgcttcgatctggcgatgctcaagccgtttatgccggaggcgacccaggccagcggcgtgtttactggtaatgccgatgtgagctgggacaccaccaaagagggactgccgcagggcaaagtgaccctcagcgggcgcaacgtcaaggtgacccaggtcgtcaacgacgcgccgttgccggtggcgttcgatacgcttaacctcagcgccgacctgcacaacaatcgcgccgagctgggctggcttatccgcctgaccaacaatggtcaactggatgggcaggtgcaggtcaccgacccgcaggggcggcgtaacctcggcggcaacgtcaatatcagcaacttctcgctggcgatgatcaacccgattttcgctcgtggtgaaaaggcagagggaaggctcaacgcccgtctgcgtctgggcggcaatgtgaaaagtccgcagctgttcggccagatgcagctgagcggggtggatatcgacggcaactttatgccgtttgatatgcagccgagccagctggcgatgaacttcaacggcacgcgctcgaccctgcaggggacggtgaacacccgccaggggcaaatcgccctcagcggtaacgccgactggacgcagatcgataactggcgggcgcaaattgcggcgaaaggcagccgggtgcggatcacggtgccgccgatggtgcgtctcgatgtatcgccggatgtggtgtttaccgccacgccaagcctgttcaatctcgacggcaaagtggatgtgccctgggcgcggatcgtggtcaacgaggtgccggagagcgcggtcggcgtctcctctgatgaagtgatgctggataaaaacctcaagccgattaagcagcagagcgccagcatcccgatcaacagcaacctgaccattcacgtcggcaacaacgttcgtctggaagccttcggcctgaaagcgcgtctgaccggtgatttgaaagtggcgcaggacaagcaggggctgggcctcaacgggcagattaatattccggacggccgtttccacgcctatggtcaggacttgattgtccgcaaaggggagctgctgttctccggtccgccggatcagccgttgctgaatatcgaagcgattcgtaacccggatgccaccgaagacgatgtgatcgccggcgttcgcgtcaccggctccgccgatcagccgaaagcggagatcttctctgatccggttatgtcccagcaggaagcgctgtcttatctgctgcgcggccagggtttgagtagtggtcagagcgatagcgccgcgatgacctcaatgcttattggtatgggggttgcacaaagtggtcaggttgtgggtaaaatcggcgagacgtttggcgtaagcaacttggcgttggacaccgaaggggtaggcgattcttcccaggtggtggtcagcggctatgtactgccgggtctgcaggtaaaatacggggtcggtatcttcgattccctggcgacgctgactttacgttatcgcctgatgcctaagctatatgtggaagcggtgtctggcatcgaccaggcgctcgatttgctctatcagtttgagttttagcaatgcgaatatttgtttacggcagtttacgacgcaaacaaggcaacagccactggatgaccaacgcccagtggctgggcgctcatagtgtcgacgattatcagctgtacagcctgggccactatccaggcgcggtgcccggcgaaggcacagtacatggtgaagtttatcgtattgatgcatcgacgctggccgaactggatgcgctgcgcaccaaggggggcgagtatgcgcgccacctgattcagacgccttacggcagcgcatggatgtatgtctatcaacgttccgttgagggttgtacgttgatagcgaacggcaactggttggatcgcgaccagtattaaccacgacagcgccaccttcgggtggcgttgttttttattacttcagttcccatggcgtcattctggcgccctgacgtctggcataacgtaatatggcctgatgtaccttcactctaccggccacccgacgtgacaggggatgggcaatcatacggacaaactccatcactattaacagcaggttaatcgggagcagggtgcctgtcagcctggtaagcatttcacgataaaatggccaactgcccagattaagcatggggtcgtgcagtttgatggtgagcgtaaaaaacatcactatgagtacgaggccgtacgcgattttataaattgatgccatctgctgattgccgggatgaaaggggctattttttaaataaacactgccatcactgacattgtataacgcctgaagatcatcgtatccatgccggcgtgcggcgataacccagtccccatcggcaagaaatggcgggcgacaacgattattcagggcatcgctcagccaggtcaagtgcgctgaaaaaaacgagtgacgagtcgccagctgaaaacaggcgccttctttgataaaataaggccttaccctcgtagcgaaccatatttgataataactattcagaatcacgccttcttcaagcgcaaattcttttggcagcgctatctcgttgttggccgatggtggatgcctttcagaagtagcgggtagaatttccagacgctgacagaatgaaatatcgccttgcttcgttcgctgcattttcgcattgagaacacgtaacctgagtgagaaattgcaagagcaaaaagagaagatgccgaagggattcaccaacattgtgataaaacataataataaaaaaatatccaaccatggagcacaagcgagaatgatcaagcaaacaaaaaagaccaagccgacaggtcgaagaagctttttaatactcagcggctgccgggaaggttcgagcaaaatatggccatcgcttaaccagtggatccagtaactgccatcctttaggcggcaagtgccgatatgtagcggctggccgagcctcagacggtcaaaaagcgaggggtctttaaaatggcgtttatcggtataaaaggcatgctcgcctgcaatgaggcgtaaatagctttgctcttccgaggcggcagtggtgaagccggtaaaattcacggtgaaataatgggtctgtttcacaaggttccttccttgatgaaatgatggtgttttacgtatcacgcgttgccgacccactccttaccagagcgggagatgatccttcgccagccacatcgcggaagccaacgtcgtcagcgcgaggaataataatcgtcgtgttggggtgctgaacattacatgatctcctcgagcgcggtatggcgggccgctccctgcaggtagtgccgcatcgccgagcgcatcttcatccagtcagccacccggtgtgacaataaccaggccgtcgggccaatcagctccagtaccgccaggatcccgccgaaactgagtaataatagggacagcatgtccagtgaatcctgaattaaccacccaaatcccctggctggtttgtatgggttatttagcgacatgccgagtatgaggaggtacatcaccagcaccatgccataaaacaggttatagactagcgacatttgccggtcaccgggataacagggatgatttttcagaaaagcgcccccgtcgctgacgttgtataacgcctggacgtcgttatctttccgttggtagacgacgactatccgatcgccgatagcgagaaagggcggttgacggcggtaaaaaaagggatgcaggccgaagttggcgaagccgttctgccagaagaaggccagcggcgccgtgtcgcattgtatcccaacgccatggtattcccgcgttgggttccccgcgaaccatttcttaaaaatgatattgctaatttttcccgtccggacggcatagcgttccggcagggcttgcgtaaaaggcttcgccgactggcggagggtttgcgccgtagtcggtagcggctggcaaaaggaaaagtcgcggcggcgggcctgcgccatcttcgccaacagatcgcgcatggcggggtgcatttttagcgcccggtggaacagtagctcgcagaggccggttaacaacgcgatgaaggccagtatcgcgataatgccgaagccgaaccttccccattctgaggtgctcatcatgagcgggataagagcgacgatgagcgtcagcaggctgatactcagcagcggccgggcccagcgctttacccgttgactgggctcaaggagcgtttcgccatcgctgagccagtggatccagtaactgccgttgtccaggcggcggacgccaaggtgcagaggctgattgatcgtcaggcggtcaaaaagcgaggggtcgttaaaatagcgtttatcggtataaaagacatggtcgccggcgataagacgcagatacccctgtttttcacaggcggcggtcgtgaagccagaaaagttaagggtgaaatagcgaatgcttttcacgggacaccctccatggtgttatcgcggctatccgtgccgcaatcaggcaggggatgaccctgcctgagacagaattacttctgcttagcgcgctcgaaagaggcaacgatttcggctttagccgcttccgcgttgtcccaaccgtcgactttaacccacttgcctttttccagatctttgtagtgctcaaagaaatgagtgatctgggctttcagcagttccggcaggtcgttcacatcgttgatgtgatcgtattctttgctcagcttggtgtgcggtacggcaaccagtttcgcatcttcaccagattcgtcggtcatcttcagaacgccaaccggacggcagcggaccacggagcccggctgcagcgggtacggagtcgggaccagcacgtcaaccgggtcgccgtccagggacagggtgtggttgatgtagccgtagttgcacggatagaacattgccgtggacatgaaacggtcaacgaacagtgcaccgctctctttgtcgacttcgtatttgataggatctgcgttcgccgggatttcgatcacgacgtagatgtcttccggcagatctttgcccgcaggtacgttgagtaagctcatgtctgtttcctttaaaatgtatggcaaacaagtgctcggtattatagccaactcacatcgaaagtcttcgcttctttttcccgatatcgccgcagagtgctccgaatttttcgcgtaataatgacatgaaaatccataaacatagccacatcatgaataaatttatgtaaccgttttcattgcatgtgattgatttatcatactgcttaaaaaaacgtcacaaaccgcaacagccgcgctccctgcgaagccttatcggctctccgctgggcagtagggccatcattaacatctcatttacttttttgaagtgtgatgtaacgcattcagttacatcaccgattgtctatagtttgtccgcaggtgagactttaaccaacaataaccctacgaggatacccttatgtggaagcgcttacttcttgtcacagcagtttccgcagctatgtcgtctatggcgatagctgccccgctaaccgtaggtttttcgcaggtcggttctgaatccggctggcgtgcggcggaaaccagcgtcgcgaaagaggaggccgccaagcgcggtatcaccctgaagatcgctgatggtcagcaaaaacaggaaaaccagatcaaagcagtgcgttcctttattgctcaaggggtcgacgcgatcttcattgcgccggtggtggccaccggctgggaaccggtgctgaaagaggcgaaagaggccaagatcccggttttcctcctcgaccgttccattgatgttaaagataaagatctctacatgaccaccgtgaccgccaacaacgtgctggaaggccagctgattggcgactggctggtgaaaaccgtcgacggtaagccgtgtaacgtcgttgaactgcagggcaccgttggggccagcgtggccatcgatcgtaagaaagggttcgccgacgcgattgccaaagcgtcgaatatcaaaattatccgctcccagtccggcgacttcacccgcagtaaagggaaagaggtcatggagagctttatcaaagctgagaataacggcaaaaacatctgcatggtgtttgctcataacgacgatatggccatcggcgccatccaggccattaaagaagctggtctgaagccgggcaaagatattctgaccggctccatcgacggcgtgccggatatctataaagcgatgatcgccggagaagccaacgccagcgtcgagctgacgccaaatatggccggcccggcgttcgatgcgctggagaaatataaaaaagacggcaccctgccggagaagctgaccatcaccaaatcgacgctgtatctgccggatacggcgaaagaagagttagagaagaagaaaaatatgggctactgagtggggagcccctcattccatccctctccccggtgggagagggtaaaaagcagcgttccagaaaccccgggaagcccagcgcgacccggggtaacctgacatcatttgaaggtgacatcgattatgagcgccgaggcacaccaggagatccttcgcaccgaaggacttagtaaattcttccccggcgttaaggcgctggataacgtcaactttagcctgcggcgcggcgaaatcatggccctgttgggcgaaaacggcgccggaaaatcgacgctgatcaaagcgctgaccggcgtttaccatgccgatcgcggcactatctggctggaaggccaggctatttcgcccaaaaataccgcccatgcccagcagctggggatcggcaccgtctaccaggaagtgaacctgctgcctaatatgtcggtggcggataacctgttcatcggccgtgagccgcggcggtttggtctgctgcgacgtaaagagatggaggccagggcgacggcgctgatggcctcctacggcttttccctcgacgtgcgcgagccgctgaaccgcttttcggtggcgatgcagcagatcgtcgctatctgtcgggccatcgacctgtcggccaaagtgctgatcctcgacgagcccaccgccagcctcgatacccaggaggtggagatgctgttcaccctgatgcgccagctcagggataacggcgtcagcctgatcttcgtcacccattttctcgaccaggtctatgcggtcagcgaccgcatcaccgtgctgcgtaacggcagcttcgtcggctgccgtgagacccgcgagctgccgcagattgagctggtgaaaatgatgctgggtcgcgaactggaccacaatgccctgcagcgggcgggccgtaccctgctgagcgataaaccggtagcggcgtttgaaggctacggtaaaaaaggaaccatcgccccgttcgacctgcaggtccgcccgggcgaaattgtaggcctcgccggcctgctgggttcaggacgcacggaaaccgccgaggtgatcttcggcattaaaacggcggacagcgggaaggcgtggatcaaaggcaaacctcagaccttgcgctccccgcatcaggcgtcctgcctcgggatcggcttctgtccggaggatcgcaaaaccgacggcattatcgccgctgcctcggtgcgggaaaatatcgttctcgccctgcaggcgcagcgcggctggctgaggccgatcccccgccgggagcagaatgagatcgccgagcgctttattcgccagctggggatccgtaccccgagcgccgagcagccgatcgagtttctctccggcggcaaccagcagaaggtgctgctctcccgctggctgctgaccaaaccgcagttcctgatcctcgatgagccgacccgcggcatcgacgtcggcgcccatgcggaaattattcgcctgattgaaaccctctgcgccgatggcctggcgctgctggttatctcttctgaactggaggagctggtgggttacgccgatcgggtcattatcctgcgcgatcgccgacaggtagcggagatcccgctcgccgagctctctgttccggcgatcatgaacgctattgcggcataaggagtaacccatgatgcctcgatctctttcgcaaaccggcccggagaagcgacgcttcacctggccgaagggcaccccgcagattattgccttgctgctggttctgctggtagacagcctggtggcgccccatttttatcaggtggtgctccaggatggccgcctgtttggcagcccgatcgatattctcaaccgcgccgcgccggtggcgctgctggcgattggcatgacgctggtgatcgccaccggcggcatcgacctgtcggtaggggcggtgatggcgattgccggcgcgacggccgcctcgatgaccgtcgccgggcacagcctgccggtggtgctgttggccgcgctggccgcgggcgcgctggccggattgtggaacggcatcctcgtggcggtccttaagatccagccctttgtggcgacgctgatcctgatggtggccgggcgcggggtggcgcagttgatcaccgccgggcagatcgtcacctttgattccccggccctggcatggctcggcagcggatcgtttctgctgtttccgacgccggtgatcgtcgccgccgctacgctgctgctgttctggctgtttacccgtaaaacggcgctgggcatgtttattgaggcggtagggatcaacatccgcgcggcgaaaaacgccggcgtcaatacccgcatcgtggtgatgctggcctatgtcctgagcggtgtctgcgcggcgatcgccgggatcatcgtggcggcggacatccgcggcgcggatgccaataacgccgggctatggcttgagctggacgccattctggcggtggtcatcggcggcgcctcgctgatgggcgggcgctttaacctgctgctctcggtggtgggggcgctgattatccagggaatgaacaccgggattttgctctccggcttcccgccggagctcaaccaggtggtgaaagcggtggtggtgctgtgcgtactgattgtccagtcgccgcgctttatcggtttactgaaaggggtacgcggccatgataaaacgtaatttaccattgatgatcacccttgcggtgtttgtgctgggctacctctactgcctgacccagttccccggttttgcctcaacgcgggtgatctgcaatatcctgacggataacgccttcctcgggatcatcgccgtgggcatgaccttcgtgatcctctccggcgggatcgatctgtcggtggggtcggtgatcgcctttaccggcgtcttcctcgccaaagcgattggcttttggggaatctcgccgctggtggcctttccgctggtgctggtgatgggctgcgccttcggcgcgtttatggggctgctgattgacgccctgaagatcccggcctttatcatcaccctcgccggcatgttcttcctgcgcggcgtgagctatctggtgtcagaggagtcgattccgattaaccacccagtgtacgacaccctgtccgggctggcatggaccattcccggcggcggtcgtctcagcgccatgggactgctgatgctgctggtggtggtggccggtatttttgtcgcccatcgcacccgctttggcaaccaggtgtatgccatcggcggcaacgccacgtcggcgaatctgatggggatttcgactcgcagcgccacgatccgtatctatatgctctccaccggactggcgacgctggccgggatcgtcttttccatttatacccaggcgggctatgcgctggcgggcgtcggcgtcgagctggatgcgattgcctcggtggtgatcggcggtacgctgctcagcggtggcgtcggtaccgtgctgggaacgctgttcggggtggcgatccaggggctgattcagacctacatcaacttcaacggcaccctcagctcatggtggacgaaaatcgccatcggcattttgctgtttatctttatcgcgctgcagcgtggtctgaccgtgctgtgggaaaatcggcaaaatacggcggtgacgcgggtgagcggggcggggagtcgctaagaaatgctcctcccgcaggcgcgggaggagcgggcagggcgcttaggcgtccgggaacgctttaataaagttctcgacgtcttctaccatgtggttgttgccgacgaagaaggagcgacgctgatgcaggctttccgggataatatccagaatacgctctttaccgtcgctggccttaccgcccgcctgttcggcgaggaaggccatcgggttgcattcatacagcaggcgcagcttgccttccgggtggctggcggtgctcggatagagatagatgccgcctttcagcaggttgcggtggaagtccgccaccagcgagccgatatagcgtgaggtataaggacgctgagtcgctttgtcctcttcctgacagtacttaatgtacttcttcacgccctgcgggaatttgatgtagttgccttcgttgatggagtaggtattgcccttctccgggaagcgcatgcgctcctggcatagacagaagacgccaagggacgggtcgtaggtgaaggcgtgaacgccgcagccggtggtatacaccagcatcgtcgacgatccgtagaccacatagcccgcggccacctgcttgttgcccggctgcaggaagtcttcttctgtcaccggcgtgccgacaggcgtcacgcgacggtagatagagaagatcgtaccgacagagacgttaacgtcgatgttagaggagccatccagagggtccatcagcaccacgtatttggcgtgttcacacccttcgaagacgacaatctcatcttcttcttcagaggcgatcccggcaacaatatcgcgtgctcgcagtgcggcttttaatttttcattagcgaacagatcgagtttttgctgaacctcgccctgaacgttttcagcaccgctggcacccaggatatcgaccagaccggccttgttgatatcgcggtggatgatcttggcgcccaactttattgctgacaacaaagcagtcagctcaccggtggcgtgggagaactcgtgctgcttttcaacaataaactcacctaacgttttcataactcgttccctgcatttttatgttgagtaaaacgaacgcaacaatcttaacaaagaatcaaaaaagtgcgcacaggtgaatcgcgccagcaaaatacagattcgcctgaaatgcatttcgccagggcccgggatatgggtaaaatgtgccccggataagaaaaggaaatgacgaatgcgcattcatattttaggaatctgtggcacgtttatgggggggctggccatgctggcgcgctccctcggtcatgaggtaacggggtcggatgctaacgtctatccgccgatgagcaccctgctggaaaaccaggggattgatttaattcaggactatgaccccagccagctggagccccggccggacctggtgatcatcggtaacgccatgactcgcggcaacccgtgcgttgaagcggtgctggaaaataatattccctatatgtccggcccgcagtggctgcacgacttcgtgctgcgcgatcgctgggtgctggccgtcgccgggacccacggcaaaaccaccactgccggcatggcgacctggatccttgaagcctgcggctataaaccggggttcgtgattggcggcgttccgggcaatttcgacgtctccgcgcgcctgggcgacagcccgttcttcgtcattgaagccgacgaatatgactgcgccttcttcgacaagcgctccaagtttgttcactactgcccgcggacgctgatcctcaacaaccttgagttcgaccacgcggacatctttgatgacctgaaggcgattcagaaacagttccaccatctggtgcgcatcgtgccgggcaaaggcaaaattatcctgccggagaacgacatcaacctgaagcaggtgatggcgatgggctgctggagcgagcaggagctggtgggcgagcagggccactggcaggcgaaaaaactgaacgccgacgcctcgcagtgggaagtcttactcgacggcgaaaaggtcggcgaagtgaagtgggcgctggtcggcgagcataatatgcataacggcctgatggcgattgccgcggcgcgtcacgtcggcgtgctgccggcggatgccgcgaacgcgctgggcagctttatcaacgcccgccgtcgcctggagctgcggggcgaagccaacggcgtcaccgtgtatgacgatttcgcccatcatccgacggcaatcctcgccacgctgcaggcgctgcgcggtaaagtaggcggtaccgcgcgcattctcgccgtgctggagccgcgctctaacaccatgaaaatgggcgtctgcaaggacgatctggcgccgtctctcggccgcgccgatgaagtgttcctcctgcagccgcagcatattccgtggcaggtggcggaagtggcggaagcctgcgtccagccggcccactggagcgccgacgtcgataccctggcggagatggtggtcaaaaccgcccacccgggcgaccatatcctggtgatgagcaacggcggcttcggcggtattcatcagaagctgctggataagctggcgcaaaaagcggccgcggctgaataagcgcgtacgcctccggtaactgccctccgcgtgagggcagttttattttagctaccaggaattgtgtgatgctgacctgcgaaagcgtacgttctaccgactcgccccatttcgccatgctggacgcgctttacgcgcgcgcctttccgtgtcacgagcagcgcgaaagcgaggccaaacgtcaggcgctgagccacccgcgctacgcgctggaagcatggttcgatgaaggcgtctttgtcggcctcagcggctgctggcagtttgccggctacggttatatcgaacatctggcgatcgacgacacgctgcgctcccgcggctatggtaaacagctgctggcgcagatcctgacgcgcgccccgctgaccattctggaaatcgatccgctaaccacggccatcgcccataaacggctgcgcttttatcagtcgatggggttccatgctaatccctgggcgcatcatcacccgagctatcatcagggcattgcggatcatgagctgctggtgctgagctacccgcagccgctcggtgagcggcagtatcagcagtttgcccgggatctcgggcacgaggtgatggggcgggagtagcccggctcggcgtaccgctccgggcattcgactggcggcgctgttactctttggcgatcggcgtctcgttctccgcgactttgttatcgccctgaatcttagcgattttctgctcaacggcggctacctgggcgctgtcgtgcagcagggtgtaggttagatcaaactgcgcgctggcgcccggctgcagctgcttcacgcgtttttgtttgcgttcaatggtgaccggataggcgtagctggtccccggttcgataccggtgacgtagccctgcttgacggtatcggtgtttttccacagcgtcaggaccggcagctgacgggtatcaaactgaatagaggcccctttatcgcccgctttgttgaccacggcggccagggtctggtgattttcatcggccaggggctgaatattaaataccatctcgtcaaaatctttagtcggtccctgataggtttgccaggtttttaacccgctcttcgcgtaatcattgaacgggctgatgctggagatcggggcgaggaaacgcgcgccttcttcgaggatcggggtgccgaagttgctgtggtagatgatctgataatcatgcggatagtcggcatggttggttaagacatcatgcaggctgaagctgttgctgcccgggacgtagcgcagttcggtcagggtctgcagatcggcttttttaaaggtgctctctttcaccagcccgcggatgcggatttcatacggcgcgctgtcggccacctccacctccaccagagaggccggcgtgttgcccgccttgccgtgtagggtataaatttgcccgtccgcggtcaccggatggccggtccattcatagccgcagcggaccatcatctcgttgaatccttccagccagccgaggccattgcggctttccaggttgataaacgccgggttgacgacctctttaaccggcgaatcccagcccatccggctgccgaaaccctcaatacgcagtaagttcatgccgcgtgtcgggctcaaggtaatggtcaggccgtctttactgtgaatggtaaggattttgctgccttcctgcttaccgccgtgcaggactttctgctcaatgctgaacgcatgatctttcaccttcagctgatcgctgttgatctgccagtttcctttatctatcccctcttcagcgttcgtcagcacccatgtttttgccacggccgagccggaaaccagcagggcgatcgtcgtcagaaccaatgtctttttcatttttattccctttttgctgaatcgattgtgtcattgacgtgtgaaatctaccggcatgggggtgattaaaatgtgaagcgcctcacctggtgagaaaatggccgatttgctaaggctaaatgggatggaagtcgtattattttgctaagtaatacgtatttatcaccaggatatgtgatctatattgttttcagatttaacgattcagcttgataagtcaggctataaacaaacgcatcgttgtgcggatgaggggactcaggcgatgcgacgggaatccccctgctggcgcaagccttagagctggggtgacggtaggccggataaggcgtagccgccatccggcataacgacgggaacggaggctggtacagcttgcccggcggcgctgcgcttgcgcgggcctacggtgttggataaccgtttgatataccgggctccgtaggccggataaggcgtagccgccatccggcacaatgacgggaacggagtctggtacagcttgcccggcggcgctgcgcttgcgcgggcctacggtgttgagtaaccgtttgatatagggaaccgtagcccggataaggcgcagcgcgccgccatccgggagactattgcgggcaaaaacagggggacttagccttcgttttccgccagttcacgcagatactggaagatcaggcgcgccgatttcggcggcttgttgccttctttctctttcttcgcattgcggatcagcgaacgcagctgctgacggtcagcatctggccacaggttcagcacttcagcgacggcgtcatccccgtcgtcaatcagtcgatcgcggatctgctccagcttgtggaacagcgcaacctgctggttgtgacggtttttcagcttgtccagcgcctgacgaatcggatcgacatcgcggttgcgcagcatcttgccgataagctgcagctggcggcggcgaccctcttttttgattcgctgggcgagttcgatggcgtcgcgcaggtcggtatccagcggaattttatccagcgcgtttttccccaggtcaacgagttccgcgccaagacgcttcagttcttccgcgtcgcgcttaatttcactcttactgacccagatgatttcatcatcttcatcttcaacgtcatcaccgggcacgtcgtcgagccagtcttcgggctgctttgtcatctcaggctccttaaaaaaagaggctaatgttaccagttaaggcgcgcactgaaaaacggttctctgttagacttcagttaactccttcttacattatggcattagcaatgaaagtcatctctcaagttgcacagcagcgtaagacgctggaagaagccgttaccacggcactggaactggcggcaggtaaatctgatggtgcggaagtttccgtcagcaaaaccacgggcatcggcgtcagcacccgctatggcgaagtggagaatgtagaattcaacagcgatggggcattaggcatcacggtttaccatcagaaccgcaagggcagtgcctcctccaccgatcttagcccggacgctatcgcccgcaccgtgcaggcggcgctggatatcgctcgctatacctccccggacccgtttgccggcgtagccgataaagatctgctggcctttgacgccccggatctggacctgttccacccggcggaggtctccccggacgacgccatcgaactggccgcccgcgcggagcaagcggccctgaaggccgataaacgcatcaccaacaccgaaggcggcagctttaacagccactacggcatcaaagtgttcggtaacagtcacggcatgctgcaaagttactgctcgactcgccactccctctccagctgcgtcattgcggaagatgacggcgatatggagcgcgactacgcctacaccattggccgggcaatcgaggatctgcagtccccggaatgggtcggggaagagtgcgcccgccgcaccctgtcgcgcctggcgccgcgtaagctgtcgaccatgaaggcgccggtcattttcgccaacgaagtggcgaccgggttgtttggccacctggtcggagcgattgccggcggcgcggtctaccgtaaatcgaccttcctgctcgattcgctgggcaaacaaattttgccggagtggctgaccattgaagagcatccgcacctgctgaaagggctggcctccacgccgttcgacagcgaaggcgtgcgcaccgaacgtcgcgatatcgtcaaagatggcgtgctgacccagtggctgctgaccaattactcagcgcgcaagctggggatgaaaagcaccggccacgccgggggcatccacaactggcgcattaacggccgcggcctgagttttgcaaagatgcttaaagagatgggcaccggtcttgtggttaccgaactgatggggcagggtgtcagtggcgtcaccggcgactactcacgcggcgcatccggcttctgggtagaaaacggcgaaattcaatatcctgtcagtgagatcaccattgcaggaaatctgaaagaaatgtggcgtaatatcgtgaccattggcgatgatattgaaacgcgcagcaacattcagtgcggttctgtgctgctgccggagatgaaaatcgccgggcaataacacctgtttgcttaaataataaaaaggaagtgagcaatgcgtaaaaaactgttagcgatgctggctgtctctgcttttgcgctcggttcagcgtcggccttcgccgacctgggcgaagacatggacactctggcagaaaacctgcaagtggtacagaagacctccgacgccggcgagctgaaagcggcgctgaataagatgcgtaccgccgcggtcgatgctcagaaagagaccccgccgaagctggaaggcaaagcggccgacagcgctgagatgaaagattaccgtcacggtctggatattctgatcggccagatcgacggtgcgctgaagctggcgaacgaaggcaaggtgaaagaggcgcaggccgccgcggaggagtttaaaaccacccgcaacacctatcataagaagtaccgctaaccgttcttttcgggaggcatcagccgatgcctcccacctgaaagcctaccgatatcacatttttccactctctttttccggcctttccgctgccgcgggcgccttgtccatgctcattgttgtgatacatctcacgccatagccgtcgtttttaccttttccctgtgaatatgtggagtcgatcacctaagccttctccctttccacttcgaagtggaaaacaactcgctacaaactcctgacccccggcgctaccttgatttccagagacatcagcggggtaacacaagtgaataacggagcggtaataaacgacgtaggggagcaggcggcgcagaccgaacgcctggctgacaagatgttacagcaggttttcgccctgttaagccgtcacgacatcgtccctaacgacgttcaggagcaaatgctgacttcccacgtgcgggccatggcccaccggtcaatcagcggcgaaccgctaccggaagtggatgccagtctgttcgaagaaatttctgaagattcaatgatgctggcccgcgaagtggtcgcacagttcggcaacctgcctgatgaagaggcctggctgctctccgtccacttcgaagtcgcgaaagataacctgtaaggagcaaaacatggaacaaatcactgtaatcattggcgaccgtctgggtaaaggccaaaaagtcgccgcaggcgctgaaaaagcgggcgcacgtgctgtggtcgtccctggcgttgcggccgacatgaagcttggcgacataatgaaagcggaaaacgccaccttcggcatctccttctgcggcagcggcggcgctggcgccatcaccgcccagaccaaatacggctacaaagcaaaatatggcatgcgctctattgatgagggcgtcaccgctatcaacgaaggctgcaacgtgctgggcttcggctttatggataaagaagagctgggcgagcggctggtcgaagcctggaaaaagaaatacggcgcataagtatgaaagagcaattcaccaccacggtgagggttgccggcaaaggcgaaagcaaatcacgggccttcgccgatgccctgaaccatgtgcaggctgcggtgatgaaatcatcctcgcgcatcctactgcgtattgagccacaggacgtgacggttgttcatgcgcgcgaagcggtacgaaaagaggcgtttctgttcttctttttgcgccgtgaacgacggacctacagcgtggagctggacgtcaccgtcaacgtgaccgccatcgatctcgataaagtggatttcgtcacgcaaacctgattgttagcaaaaggtctgactatgttcctgataattttaataaaatcgcttatcatcggcggcctggtcggcgtcggcgtgggcgccggagcggcacgcatgtttcatgcccccaccacgcaggggatgggggcgtttcgaaccctgggcgagctgaattcctgtgagggcgatccggcctcccacttctcctttggccttggcttcttctttaacgcctgggcctcttccgttgcagcaggctccttcacccaggatgttgaccaccgcattatccccaactggggcgcggcggcgctgatgctgaaaaatcgtaacgtcggcgaaacgctgcacgatccgaaaaaaatggccatctcctgcggcatcatcggcatgatcgtcgtcgccttcctcaacctgaccgcctcgtccgtaccggaagcgctgcaggtgaccgccgttaaggtactggtgccggcggcaaacctgctggtgaacaccgtgatgccggtgatcttctggctggcggcgatcgatgccggtaaaaaatcaggcttctgggcgacgattttcggcggcgccgcgcagctgataatgggtaacgccgtaccgggtctggtgctggggatcctgatcggtaaaggcgtcgaagagagcggctggaaccgggtgactaaagtgatgatggtggccatcgtcgcgctgtttgtcctcagcggcttcttccgcggcttcgacatgaagatgatcgaatccttccatctgaccgtgccgaactggctggacatgatccacaactcactcagcggcaagtaacgggagccggataatggaacagaataaaggtttttggtatgccgactggtcgttcccgatctttgttggcctgctctcctccggcgtcttcgccgggacccacatgtactacctgtacggcatcggcgcctttaacgaagtggccttcgtggcgatgctgaagtcggggattgataccggcgtttacggcgcggtggcggcgtttggcgccagcttcctgttcgcccgcatcatcgaagggtcgctggtagggatcctcgatatcggcggcgcgatacagaccggtatcggtcttggcgtgccggcgctgctgctcggcgcgggctttgtcttcccggtggcgaacttcgccgcgtcgctggtcaccggcctggtcctcggcctggcggtgggctacatcatcattctggcgcgtaagttcaccatcaaccagagcgattccacctacggcgccgacgtgatgatgggggccggtaacgcctccggccgcttcctcggtcccttgatcatcctcagcgcaatgaccgcctcgattcctatcgggattggctcactggttggcgcactgctgttctacatctggcagaaaccgatcaccggcggcgccatcctcggggcgatgatcctcggttccatcttcccggtggcgattagctaagcgcccgatggcgctgcgcttatcgggcctacaagccagcgcggtttgtaggccggataaggcggtacgccgccatccgtacactcttttcatcaggagatagctatgtttgatttactcctgcgccgcgcgcgcctcgtcgacgataccctgactgatatcgccattcaggacgggaaaatcgcggcgctgggcgagattagcgcgccctcccgtaaaaccattgagatgaacggcaaggcttacgtcagcgctggctggattgactctcacgttcactgctacccgaattcaccgatttatcacgatgagccggatagcgtcggcatcgccaccggcgtcaccaccgtgatcgatgccggcagcaccggcgccgacgacgtcgatgacttctatcaactgacccgtaaagcggcgacggaagtttatgcgctgctcaacatctcccgcgtcgggctgattgcgcagaatgagctggccaatatggccaatatcgacgccgccgcggtgaagcaggcggtgcagcgtcatcccgactttatcgtcggcctgaaggcgcggatgagcagcagcgtcgttggcgaaaacggcattacgccgctggcgcgcgccaaggccattcagcaggaaaacgacgatctgccgctgatggtgcacatcggcaataacccgccgaacctcgatgaaatcgccgatctgctgagcagcggcgacatcattacccactgctataacggcaagccgaaccgcattctgaatcctgccggcgagctgcgtagctctattactcgcgctctgcagcgcggcgtgcgtctcgatgtcggccatggcaccgccagcttcagctttgaggtggcgcggcgggcgattgcgctgggcattctgccgcacaccattagctccgatatttactgccgcaaccggatcgacggcccggtgcgctcgctggcgctggtgatgtcgaaattcctcgccatcggcatgacgctgccgcaggtgattgactgcgtgaccgtcagcgccgccgaagggctgcgcctgtcgcgtaaagggcggctggaagtgggcttcgacgccgatttaacgctatttcgcctggagcaccggcccacgctgctggtggatgccgaaaaagagagcctgcaggctgacaacattctggtgccgctggccgcgatccgcgcgggcaaaggctatctgaccgaacaagggagcgcggaacatgccttcgatttttgagaaataccatttaaaacaggtgattaatacttctggccgcatgacggcgctgggcgtttccacaccgcgcccggaagtggttgaagccgcgatggccggtatgaaccagtactttgaaatgaaagacctggtgaataaaaccggcgagtacatcgccaaactgttggatgtggaaggggcgaccgtggtctcctgcgcatcggcggggattgcccagtcggtagcggcggtgctggtgaaagacagcgactggctgctggagaacctgcacgttacgccgattgaaaataacgaaatcgtgttgccgaagggccacaacgtcaacttcggcgcgccggttggcaccatggtggcgctgggcggcggtaagctggtggaagcgggctacgccaacgaatgttctgcccaacagctggcggcggcgatcactccgcgcaccgcggcgattctgtacatcaaatcccaccactgcgtgcagaaaagcatgctcaacgtggcgcaggccgcggaagtggcgcgccagcataacgtaccgctgatcgtcgatgcggcggcggaagaagatctgcagtgctactaccgcatgggcgccgacctggttatctacagcggcgcgaaagcgattgaagggccgaccagcgggctggtgatcggcaaaacgcagtacgtcgagtgggttaaacgccagtcgatggggattggccgggcgatgaaagtgggtaaagagggcattctcggcctgacctgcgccattgaacactacctgacggcgagcaaagagagcggtcagcagatggtggcgaagatgacgccgtttatcgaacagctcaacacgcttaacggcgtgaccgcccgggtggtgtgggatagcgcgggtcgcgatatcgcccgcgccgaaatcaaatttgatgaagcgaccaccggtgtgaagaccggcgatctggttaacgcgctgaagcagggcgaatacgccatctacttccgcggctataaagcgaatgaaggcattatcgaagccgatgtccgcagcgtaaacgcccagcagctggaggtggtcgctcgccgcatcgcagaagttctgaataaggagaaacaagcatgaaactgaccccaaacttttaccgtgaccgcgtgtgcctgaacgtcctggcgggcagcaaagacaacgcccgtgaaatttacgacgcggcggaaggtcacgtcctggtcggcgtgctctccaaaaactatccggacgtcgccagcgcggtggtcgatatgcgcgactacgcgaagctgatcgataatgcgctctccgtcgggctgggggcaggcgatccaaaccagtcggcgatggtgagcgagatttctcgtcaggtgcagccgcagcacgtcaaccaggtcttcaccggcgtggctaccagccgcgcgctgctcgggcagaacgagacggtggtcaacggcctggtctctcccaccggtacgccgggaatggttaagatctccaccggcccgctgagcagcggcgcggcggatggcattgtgccgctggaaaccgccatcgcgctgctgaaagacatgggcggcagctccatcaaatacttcccgatgggcggcctgaagcaccgcgccgagtttgaagccgtcgccaaagcctgcgccgcgcacgatttctggctcgagccgaccggcggtatcgatctggaaaactacagcgagatcctgaaaatcgccctcgatgccggggtaagcaaaatcatcccgcatatttacagctcgattatcgataaagccagcggtaacacccgcccggccgatgtgcgccagctgctggagatgaccaaacagttagtgaagtagtgcccttgtccctcaccctcaaagggtgaggggcagcttatcccactgaaccatcaaggagttgctatgcctgtcgctcgtcatctgcttgtcgcttcactgtccctgtttgccgccgccgcgggcgccgcgcaaacccactatgcctgggtaggcacctataaccccaatggcgaaggtctgtatcgctttaccgtcgatgccaaaaccggcgccctgcgcgataagacgctggtgagctcgttgccgaacgtcgcgcagttaaccgtgtcgcgcgatggcaaaacgctgtatgccgccagtgaagtcgaaaaaggcgtggtgcaggcgtggcgcattgaaaagaacggcgagctgaccgcgctcaaccaggtcgcctccggcggcgccgggccggtgtatctctccctgacgccggacggtaagcatctgctggtggctaactatgtcagcggcagtatcgccgtgctaccggtgcaagaagatggtagcctggctgaggcggtggacaggcatcaggatgaaggcccggcaggcgccgaacgcccggcggcggccgtcgagggcagcttcgccatcagcgatcacaacggcccgcatgcccatatgatcgccgccgatcccagcgggaaatacgtttactctaccgatctggggctggatcggatctatcagtatcggctggatagcgccagcggcaagctaacgccgaacgatccgccgtttatcgccgcctcgtcgccgggagccggcccgcgccacttcgtctttacgccacagggcgacggcctgtggctgattaatgaggaagcctcgacgctgaccttctatcatctggataagcaaagcggcctgctgcgtgaaggcaaaactgtctccgcgctgccggaagggtataaaggcaccagctttgccgccggacttgtgttgagcaacgatggcaaacagctatacgtcgccaaccgcctgcataacagcattgcccacttcacggtgctggccgacggcagcctgagtcaccaggaagatatctggacgcgtggcgattatccccgcaccctgacgctggataatcaggggcagtggctgtacgtcatgaaccagcgtagcgataatattacccgcttcagcgtggcgccgaaggatggcaaattaacctttgcctccgactatacgccggtcggtagcccatcgcagatggtgatatccgcccaaccctgagccgtaattacaaggaactgacatgcgatttcccaaccaacgcttagcgcaactcttcaccctgctgcgaaatgaaacgctgccgcaggatgagctggcgcaacgcctgtcggtttccacccgtaccgtgcgcgccgatattaccgccctgaatacgctgctggcgcaatatggcgcgcagtttatccttaaccgcggcagcggttatcagctgaagatagataatccgacgagtttccaggcgctggaggagaccgcgccgaaggcgcagcacgtgccgcgtaccgcccaggatcgcatcacgtttctgctggtgcgtttcctgacctcggcgttctctatcaagctggaagatctggcggatgagtggttcgtcagccgcgccacgctgcaaaatgacatggttgaggtgcgcgagcgcttccagcgctatcagctgactcttgaaacccgcccgcgccacggtatgaagctgttcggcagcgaggtgtcaattcgcgcctgcctgaccgacctgctgtgggagctgacccagcaaggcgatatcgcgccgccgatcggcgccgaggcctttgcggcggaggtgccagcgctgctggagccggtgctgcaggagacgctcacgcggcatcatattcgcctcaccgacgccggcgagcgctttgtctgcctgtatggcgcggtggtggtgcgccgcgtcagcgaaggctacccgctggccgatttcagcgctgaagatgtggcgcagaacgtccgcgacgccgcgcgcgagctgacgggcgagctgcagcggctggccgggaaacctttatcgcccgccgaagaagagtggctatgcgtgcatatcgcggcccgtcaggtgcaggatgtcgatccggaaactatcagcgccgacgatgatgaagcgcaggtcaattacatcctgcgctacatcaacagccagtataattacaacctgctggacgacgcccagctgcatgccgatctgctgacccacattaaaaccatgatcacccgggtgcgctaccagatcatgatccccaatccgctgctggataacatcaaacagcactacccgatggcctgggatatgaccctggccgcggtctccagctgggggaaatatactccgtacaccatcagcgaaaacgaaatcggctttctggtactgcatatcggcgttgggctggagcgccactacaacatcggctaccagcgtcagccgcaggtgctgctggtgtgcgataccagcaatgcgatggtacggatgatcgaggcgatcctgcagcgcaaatatccgcagctggagatcgccgctaccatctcccagcgcgagtacgaacagcgggacgcgatcgaggcggatttcgttatctcaacggtgcggatcggcgaaaaagacaagccggtggtgaccatcgcgccgttccccaccgactatcagctggatcaaatcggcaagctggtgctggtggaccgtacccgtccgtggatgctgaataagtacttcgatgccgcccacttccgggtggtcgataagccgatggatcagcaaacgctgttcgccgagctgtgccagcagctgctggaggaaggctttgtcgatgcggagtttcatgcttcggtggtggaacgtgaagcgatcgtcagcaccatgctgggggatggcattgcgctgccgcactccctggggctgctggcgaaaaagacggtggtttataccgttatcgtcccgcagggcatcgcctggggcgacgaaaccgcccatctcattttcctgctcgctatcagcaaacgcgagtatgaagaggcgatggcgatctacgatattttcgtgactttcctgcgcgagcgcgccatgagtcgcctcgccgcgacccgcagcttcgatgagtttaaaacggtggcgatggagtgcgtcagccggttttgagaggcgttttccagattcgagtgtaattcaaatgtaatgctatactgcattacaaaattcccttttctggaggcataatggccacgctcaatgttcgactggacgataaactcaaaaaagaggcttatgccgtgctggagaaactcgatatgacaccaacggaggcggtacgcctgctgtttcaatacattgcggaaaatggccgcatgccggtgaaaagtatgaccatcagtgatggcgaagcggcgttattacgcaccgttcgcgaacggctggaaaacccacggccgggggttaaggtgagtctggatgacctatgaactggagtttgatccacgagcctggcgcgaatggcagaagcctggcgagacggtcaaaaaacagttcaaaaataagctccagcagattgtgcagaatccgcgaattgagtcgaccaggctgagcgatttaccggattgctacaaaatcaagcttaaggcgtcaggttatcggttggtgtatcaagtacgagatagtgtggtggtggtttacgttattgccattggcaaaagagagaaagcggccgtttatcatcaggcgaataaacggctctaaacgctatcgcaaatgatgtacgacctggttgctgctgccgcgccagataagcgccggatctttcaaatcctgcacaaacttaccgtcaaccagcacgttaatcaggttcacgacttccatctgctcggcgttcagttcgtcaatcttatagcccgtccagacccagatatctttgccggggcattcggcgcgtacgcgctgaaccagctttaaaatatccgcgatgttctgcggatgcagcggatcgccgccggagagcgaaagcccctggcgtttgatgcgggtgtcgttgaggtcggcgatgatacggtcggccatctcagcggtaaacggcataccggagttcacccgccaggtgcttttgttgtagcagccggggcactcgtggacgcagccggagacaaacagggtgcagcgggtgccggggccgttgacgatgtcgacggggtagtactggtgataattcattttcgcttctcaattaacgccatagccgcgttggctgcgctcgctcaccccggtcacgtactgaatgtacgctcccggggattccctcgtttgccgccttgctctgacgctaattgctttgcgaaaacggaggtgctgtgcatatgtaaagggaacggctcccggcgtcgctgcgctcgcccgggctacgaaaagccgcatacgcggttgtagcccggataaggcgctttgcgccgcgatccgggaacggctccttagtggccaaacggctacggggccggtcccttctccccgttggggagagggtgaggggctaaaccagctggaattaaccaatctgcccattgcccaggtgcttcacgcggcgcttcacttcttcctgcttgccggcgttgaacggccgcgcgtccgggctgccgagataaccgcacacccggcgggtaacggaaacgcgggcggcgtcgtggttaccgcatttcgggcaggtaaagcccttgctggtgcactcgaactcgccggtaaaaccgcactcgtagcactcatcgatcggcgtattggtcccgtagtacggcacgtgctgatagctgtaatcccacacgtcttccagcgccttgaggttatgctggatattcgggtactcgccgtagcaaatgaaccccccattggccagcggcgggtacggcgcttcgaaatcgatcttatcgtacgggttgaccttcttctccacgtcgaggtggaagctgttggtgtagtaacctttgtcggttaccccttccaccacgccaaactcggcggtgtcgagacggcagaagcgatcgcacaggttttcgctcggcgtgctgtacaggctaaagccgtagccggtttcttccttccacaaatcgacggcgtcgcgcaggcgctggacgatggctacgcctttctcacgcagcgcctcgctgtcgtacatatgctggttgccgtacagcgcattgatggtttcatggataccgatatagcccagagaaatggatgctcggccgtttttgaagatctcggagacgtcgtcgtcggctttcagccgcacgccgcaggcgccttccatatacaggatcggcgccacgcgagccttcactccttccaggcgggcgatacgggtcatcagcgctttgcgcgccagctgcaggcgctcgtccagcagcgcccagaaggcggcttcatcgcctttcgcttccagggcgatgcgcggcaggttgagactgatcacgccgaggttattgcgtccatcatgcacctgctcgccgttctcgttttcccataccccgaggaagctgcggcagcccatcggcgttttaaacgacccggtgactttcaccacctgatcgtagttgaggatatccgggtacatgcgcttgctggcgcactccagcgccagctgtttgatgtcgtagttcgggtcgccgaacttatggttcaggccgtcgcggatcgcgaacaccagtttcgggaacaccgcggttttgcgatttttaccgaggccggcaatgcggttgcgcagaatcgactgctggatcagccgcgattcccagctggtgccaaggccgaacccgaaggtgacgaacggcgtctggccgttggcggtatgcagtgtgttgacctcatactccagcgactggaaggcgtcgtagcactctttttcggtacgggcgcgggcatagccttcggcatccgggatctgccactcttcggcgattttgcgatgctttttgaagctttcgctgacgaacggcgccagcacttcatcgatgcggttgatggtggtgccgccgtaaatatggctggcgacctgggcgatgatctgcgccgtcaccgcggtggcggtagagatagacttcggcggctcgatctccgcgttgcccatcttaaagccctgggtcagcatgcctttcaggtcgatcagcatgcagttgaacatcgggaagaagggcgagtaatcgaggtcatgatagtggatcatgccgcgttcgtgagccatcaccacatcgtggggcagcaggtgctgccgggcgtagtgcttggcgacgatcccggccagcaggtcgcgctgggtcgggatgactttactgtccttgttggcgttttcgttgagcagcgcggagttggtctgctcgacgaggccgcggatctcctgattgagacggccgcgcttctcacgctggctatcgcggtcatggcgatactcaatgtaggcgcgcgccagctgcttataggggccggacatcagctggttttccaccgcggtctggatctcgttgatgtcgacctgggcgcggccctgcatttgttggctaacgacttctgcgacggtggcgcaatagtctgcgtcatcgactcccgctgctttagctgcacgcagaattgcttcctgaatgcgctctgagttgaacggcactttacagccatcacgtttcatcacatgcggtgtcatgatcactccatatatagaacaggttatccacagaggcggaggttatcccgaaggcgctgcacgctacggctcgtgctgtttaccttcggatccggcccgttttatccacatctcatcaccgccagacatcgacaagatatggtgacataatagacgattaatacaatatgttgggccgaggcgcattttaagttctatatgtagtgatttgcatcaaagatgtttgcgattttattgacccagaacaaggtaaaaaggtgagagtacggatgatgggcgctggcgataaatgtaaatttaggcgcttaaaatataatcaaaaatcgagcccgttcaggcatgaaacgggcaaatattcaggcaatcaacgtatcgttaagcagatcgaccagcagtagcagggcatagcgagcctgctgcgggtcagcgggcagcggcaggatggcgctggccatatcgccaagggcgtgctgttccggcgtcagagcaataatggtcactccctgcgtacgcgcctgcaaagtggcgctttgcaacacagggttggcctcggcagtggccagcaccagcagcagatgatcgtcattgagggtgctggcggtcagccgcatcagcgccgcatcctggcagagattaatcgcgatgccggagggcagtagctgatgctggagcagcgcggccagcgtcacgtcctgggcgccaagggcgaagcagtgtaccgcacgggcgctcagcaggcgcgatttacacttttccaccgccgcttccgcggtatggccgagctgacgagttagggtaacgccaaggctgctaagtttgtcgcgccaggcgacgggcagggcggcgctgtccggcgtaagccagctggcgcgccgttcgctggcctgcgccagctgtttacgcagatcacgaatatcatcgcagcccaccgagcgggcgaagcgggtaatggtggcagggctgacccccgcgctggctgccagctcgtcaatagaggcgctggcggtaaagcttagattttgtagaataaaggtggcgacgcgcgactcctgggcactaaagcggcgcattccttcctgcagctgacctacgatatccatcctcatgttccctttggcaaaacccgtatttgaaaatatttttcaattatcgactgtctctctttatagcactcacgccgcatatttcctatggtcagagcagtaaagggtgacaccctggcgataaaaatgcgcaaaaattgagcctcgatcacatcggtgaaaattattttcatatagccttcactatcacacaatattaacaatatagtcgtccaggccctgagggctgaagcgataacacgtaaaggggaagcgcaatgccacgaatcgtactctgttgtgccgcaggcatgtcgaccagcatgctggtgaacaaaatgaaagcagaagcccagcagcgtgcgctggcgctggaaatctatgcggtggcggtggcggaatttgaacgcgaactgccgaacgccgacgtcatcctgctcgggccgcaggttaaatatgaagccggacggctaaccgcgctggccgcgccccagggcaaggcggtggcggtgatcgatatggctgactacggcatgatgcgcggcgctgcggtgttggataaagcgctagccctgctcgaacactaattttctcatcccgtttttcatcatcatcacgtgcggtcctggcgatcgcgcgcggcgctctgtatgccgaaaatccgaaaagaggacactatgcaagcactgaaaattgccgttatcggcggcggcagcagctacacgccggagcttattgaagggattatcgttcgttacgagcagcttccggttacagagctggcgctggtagatgtcgaatccggccgggaaaaggtggagatcatcgccgcgctgacccggcggatgctgaaacataaagggctggagcaggtggcggtcagcgtccactttacgctcgatgaggccatccgcggcgccagctttgtgctgacccaactgcgggtcggacagctggcggcgcgcgccgccgatgagcggctgggtctcaagtaccacctgctgggccaggagaccaccggcgtcggcggttttgccaaggcgctgcggacgatcccggtgatccttgaggtggcgcgcaaagtggaacagctggcgccggaagcgttcattctcaactttactaatccggcggggatcgtcaccgaggcggtcagccgctacagcaaggcgaagatcatcggcctgtgcaacgtgccgatcaacatgcagcacatgatcgtcgggatgctgggcgcccaggagtccgaagtaaaactgcgctttgccgggctcaaccatatggtttgggtgcataaggtgctacaggggcgcgaggatgtcaccggcaaggtgatcgacatgctgtgcgacggtaaggcgctgtcgatgaacaacattaaagagctgccgtggccggcggaattcctgcgcgcgctgaaggcgattccgtgcccctatcatcgctatttttggctgacgccggcgatgctggcggaagagatcgccgcggcgaaaaccaagggcacccgcgccgaacaggtgatgaaagtcgagcaggagctgtttgcgctgtacgccgacccgcagctggaagaaaaaccggagcaactgagctttcgcggcggcgcctactactcggaggtggccgtcgagcttatcaacgcgatctacaacaacctgggcgcggagatggtggtgaatacccgcaacaacggcgcgattcatggcctggatgatgatgcggtggtggaaaccaacagcattattgatgcgcaaggggcgcggccgctggcgttcggcccgctgccgccggcgatgaacggcctgacccagcaggtgaaagccttcgagcggttgacgattgaagccgcggtacacggctgtcgcgaaagcgcactgctggcgctggtgaccaacccgctggtcggtaacgtcaccgatacccaggcgctgctggatgaagtattaaccatcaaccgtcaatggctgacgcaatttaactgaccgctatttcccctcgggagcacaccatgtcgaatacaagctggattgaacgttacgtcatgccggcggcgctgagaatcgccgggcaaaagcacgtcctgtcggtgcgcgacggcatcattctcaatatgccgtttatgttgattggctcattcttcctgattttcgcctacctgccgatccccggctatgccgacatgatgagcggcctgtttggcgaggtctggcgcgataaaatgctgtacccggtgaaagcgacctacgacattatggcgctgatttccagcttcggcatcgcctaccggctggcggagaagtatcgcactctcgatccgctgagcgctggggcgatgtcgctggtggccttcatgatgacgatcccgcagaacacgctgtttacgccggtacacggcgcggcggaggtgattaaaggggtgatcccggtgagcatggtcggcagccaggggctgtttgtcgccattgtcatttcgctgctgtcgacggagatttatcgtttggtcgccagccgcaatctcgttatccgcatgccggacggcgtgccgccggcagtggcgaaatcattccttgccctgatccccggcttctgcgtgctggcggtggtgctggcgctgcgcctggcggtcgaggcctcgccgttcggcgatatcaacagtatgatcgccaccctgattggtattccgatgcaccacgtcggcggtacgctgccgggcatgattatttcagtcattttgattggtattttgtggaccctgggcctgcacggcgacgcgatcgtactggtgtttatccagccggtatggctgtcgaatatgtccgagaacctgacggccttccagaacggtcagccgatcccgcatatcattactcagcagttttacgatctgtggattgcccccgggggtaccggcgcgctgctggggctggtgatttttatgttgctgcgtagccgtagccagcagatgaagcagctggggaaaattgccgcgcccggggcattgtttaacatcagcgagccgatggtgtttggcatcccgctggtgatgaacccgtactttttcctgccgtttattttaacgccggtgctgctggtgatcgtgtcctataccgcgatggcgaccgggctggtggcgccgcccgccggaatcgcgctgccgttcaccacgccgatcttcatcagcggctatctggcgaccggagggcatatctccggcacggtgctgcaggtggtgaatttagcgatttcgctggtggtctactatccgttcttccgcgcctgggatcggctaaaggcaaaagaagagcacgcctcggcgcaaccccaagcgagcgctgcgattgctgatgccgaccgcgcataacttccagcctgacgaatcgtagccccggtgagcgttgcgccaccggggaaaagcgttatccctgcagccaccatatcgcttcgaacggccgcagcgtcagcccggtcgggcgcggggtggtctcggcatagttgctgatgatcatcttccactcgcccggggcctcagcgggctgccaggcctgcagctcgcggctcaggttagcggcgactaccagcgtttgcccctgccactgacgacgatagcaccacagcgacggatgctccggcagcagatcctcgtaatcgccccaggtcagtagcggcagggttttacgcagcgtaatcagctgctgataggcataaaacaccgaatcggggtccgccagcgccgcctcgacgttgatctcctggtaattatcgccaaggccgatccacggctcaccgtcgctgaagccaccgttctcgccggcgtgccacggcatcggcgtgcggctgttgtcgcgcgacttgctggcgaggatcgccagcagttcgtccgggctttgcccctgcgccgcacgttcgataaacatattatggctttcgacgtcacggtaatcgctgatgctgctgaagtgcggattggtcatgccgatctcttcgccctggtagatatagggcgtgccctgcatgccgtgcagcaccatcgccagcatcttcgccgccgtcacccggtactcgccttcgtcgccaaagcgcgacacgatgcgcggctgatcgtggttacaccagaacagcgcgttccacgcccgattgtgcattccccgctgccagtggcggaacagcgccttcagcgccacatagtccgggcgggcgagggtccatttctctccgccgggataatcgacttttaaatggtggaagttaaaggtcatcgacagctcgcggccgtccagcgcggcgtactgctggcagtgctccagcgaggtggaggacatctcgccgacggtcatcaggttacgcggggtgaagacatcgcggctcatctcctgcaggaactcatgcacccgcgggccgtcggtatagaagcggcggccatctccgtccagatcgcagggaaaggtctggtcttttgagatcaggttgaccacgtcgaggcgcagaccgtcgacgccgcggtcagcccagaattcgcagacctttttcagctcggcgcgcaccgccggattctcccagttgagatccgcctgctcaatggcgaacaggtgcagataatactgcccgctgtcggcgtgccactgccaggcgttaccgccaaatttggagcgccagttgttcggcagggcgtccggttcgccatcgcgccagatatagaactggcggtagggactctccttattcagcgactgacggaaccattcatgttcggtcgacgtgtggttcagcaccatatccagcacgatgcggatgccgcgggccttcgcctccgtcaccagggcgtcaaagtcggccatcgtgccgtaggaggggtcgatggcggtgtagttcgccacgtcgtagccgttatctatctgcggtgagacgtagaacggcgtcagccagatggcgtcgaccccaagcttttgcagatagtcgaggcgggcggtgacgccgcgcaggtcgccggtaccgctgccggtggtatcctgaaaactcttcggatagatttgataaataacgccgttttgccaccagtgggggagatgattcatagtactttcctgctgcaacgaggggcgccaaaggcgccccgaaagaagaagttagacaatctgcaaggtgccctgacggtacttgcgctgatacaccacgctggtgaggataatcggcaccaccaccgcgatagccatcgccatggcgtacacctgccagtaggtaggctggatggagaggatccccggcaggccgccgacgccgatgccgttcgccagcacgccgttcaggccgcacagcaggccggcgaggccagagccaatcattgcgcacagcatcgggaagcggtatttcaggttgataccgtacatcgctggctcggtgaccccgagataggcggagatcgccgccggtaccgagatttcacgttcattctgcttgcggctggcgatgatgatgccgaccaccgccgacgcctgggcaatattcgacagcgcaatcagcggccacaccggggtaccgcccatgctctggatcatctgcatatcgatagcgagggtggtctggtggacaccggtaatcaccagcggcgcgtagaggaagccgaacagcgcggcgccgatcggcgcgaagctgccggttaacagatggcgtaccgcgaaggccacgccgtcgccgatcaggcggccgaacggaccgataatggcgtgcgcgaggaacaccgcgaggatcagcgagcagaccgggacaatcaccaggtagaggtagtcaggcacaatgcgcttgaggcgcgtctcgataaagcctaaggccaggccagccagcagggccgggatcacctgcgcctggtagccgactttggcaatggtaaacaggccgaagttccacacctccggcacctgctggccgaggagataggcgttcatcagctgcggggagacgagggtgacgccaaggacgatcccgaggatcggcgtgccgcccatcttcttcaccgctgaccagcagatccccaccggcagatagaagaagatcgcctcgccaatcagccacaggaagtcatagatggttttcagcgacgggtgcatctgggccagcgtctggccattgctcatgggcaggtcgccgataacgttgcggaaaccgaggatcagaccgccgctgatcagggccggcagcaggggaaagaagatctcggcgaagtgcgagattaactgttcatgccacttcatattttgccgcgcggcctgcttgacctgctctttgtcggcggaggtctggccggtggtcgccagcagggccttgtagtaatcgcccacctcggtgccgatgaccacctggaactggccggcgttagtgaagcatcccttcaccatgcgcagctgctcaatctcttttggtctggcgatggccgggtcgttcagcacaaagcgcaaacgggtaatacagtggctgacggtggcgatgttaccgcgcccgcccaccagttcgatcagtttatcgatgtcctgctggtttactttgctcatgatgaagcctcaaaaacagagggggagagatgccgtttttaccttgagggcatcctaaccgttccgcttaatttgcaaaatgggaacgttcccgaaacccggcgacgatcacataaatcgcccgagcgagattaattgagggcggcgggaatcacgatctggcggggatcgacgctgccggcgatctgctcgatcaactgccgggcggcccggcgtccggactcggcatagcccggatcgacggtcaagatttccgggtggagaaacttcatcagcggcgtgctgccgacgctggcgagctgcagcgcatcgcgaccctgctgctggaggtacttgctggcgccgagggcgagggtatccgtcgcgcagaccagggcgctggtttcagccgtcagcacgctggcgacggtgtcatatccctgcttcatgcccagccccggcagggcggcggtgggcgtcagacgatgctttttacagaaggcgaggtaggccagatggcggcgttcgccggtggtgacgtcgctgtgcggtacgccaagaaaactgatgtggcggtgtccgcgatcgtagagccgctgcatcagcagcgtgatggccccctcgtcgtcatagcacaccgaggcgaagccgggagcgtcgcgggccatcagcaccagggtgtcgcgccagggggcgagcatcgcttcgtcgatgccggtaaaaccgaacagtaccacgccgtcaatattgcgccgggcgagcatgccgagatgctccaccaccaacgccggggagaactggctctccatcataatcggatcgtaaccctgctcataaaaggcgggcagcatggtctgcacggcaaggttttccgacagcgaatcgagacgggtgacgataatcgccaccactttatcgctctggccgcgcatggcgcgggcggaacgggagggcgagaaaccgtgctgctgcatcaccgcttcgacgcgctcgcgggtccgttcgctgaccccgctctcgttgttaaggacgcgggataccgtcgatttccctacgccgcttaagcgcgcgatatctttgatggtcagccggttctgcatgcggaattctcgtcagggatggtagaagtgagcctaatgctactcaaccaaaccgcaatgagcaaagtctggtttacgttcggtttagttgcgcgggtttatcatcgccattattgccacacaatcctcagcgagggcgctataattcgcgccgtttatattcacttaccggagatagttatggaccccgatcccactcctcatcctcgatggagcaacctttctttccggtaagcctgtttaacactgctttaccggaaagcgtaaagcagtgacgtccttgatgtccctgccataaaaataacatgcctgacaggtaggttttgctacgcccgtcggcaacgctgcgttcgctttggcgagcgcggagggactgtttatgctgaaaaattatacccggcagctgttcgcgcagcttagccgccatctgccacgtcgtttagtccagcgcgatccgctgccggacgcccgccatctggcgagtggccccattcctgaatcgcttggtcagcattgcctgaacgtggcggcgatggacgaccaggagatctggcgcgcctttgacagccaccctgaagggctcaatgaaggcgaagtggcggcgaaaatcctcaaacatggtgacaaccagatcccggcgcagaagccctccccgtggtgggtgcatctgtggacctgctatcgcaacccgttcaacctgctgctgaccgtgctcggcatcgtctcctattccaccgaggatctgttcgccgccggggttatcgccctgatggtggggatctcgacattgctcaatttcatccaggaggcgcgctcgaccaaagcggcggatgcgctgaaggcgatggtgagcaacaccgccaccgtgctgcgggtggtgaacgagcagggggagagccgctggctggagctgcctatcgaccagctggtgccgggcgacattatccggttgtcggcgggggatatgatcccggcggacctgcgtatcctgcaggcacgggatttattcgtcgcccaggcctcgctgaccggcgaatcgctgccggtggagaaagtggcccgcagccgcgatccgctgcagcaaaacccgctggagtgtgacaccctgtgctttatgggcaccaacgtggtgagcggctcggcgcaggccatcgtcttcgccaccggcggccgcacctggtttgggcagctggccggccgcgtcagtgaacaggagagcgagccgaacgcctttcagaaaggcatcagccgggtcagcatgctgctgatccgctttatgctggtgatggccccggtggtgctgctgatcaatggctacaccaaaggcgactggtgggaggcggcgctattcgcgctgtcggtggcggtcggcttgacgccggagatgctgccgatgatcgtcacttcgacgctggcgcgcggggcggtgaagctgtcgaagcaaaaggtcatcgtaaagcacctcgacgccattcagaatttcggcgcgatggacatcctctgcactgataaaaccggcaccctgacccaggataagattgtgctggagaaccataccgacgtctccggcaaggtctgcgagcgggtactgcatgccgcctggctcaacagccactaccagaccggcctgaaaaacctgctcgacaccgcggtgctggagggcgttgagctggatgccgcccgcgggctggcggaacgctggcagaaggtagatgagatccccttcgacttcgaacgccgccgcatgtcggtggtggtgaaggaggatgacgccgcgcatcagctgatctgtaaaggggcgctgcaggagatcctcaacgtctcgacccaggtgcgctacaacggcgatatcgtaccgctggacgacaccatgctgcgccgtattcgccgggtgaccgataccctcaaccggcaggggctacgggtggtggcggtggcgactaaatacctgccggcccgcgaaggcgactaccagcgcgccgatgagtcggacctgatccttgaaggctacatcgccttcctcgatccgccgaaagagaccaccgccccggcgctgaaggcgctgaaggccagcggcatcacggtgaagatcctcaccggcgacagcgagctggtggcggcgaaggtgtgccatgaagtgggactggatgctggcgaagtggtgattggcagccagatcgaagccatgagcgacgacgaactggcggcgctggccaaacgcaccacgctgttcgcccgcctggcgccgctgcataaagagcgtatcgtgacgctgctcaagcgtgaaggtcacgtggtgggctttatgggcgacggcatcaacgacgccccggcgctgcgcgcggcggatatcggcatctcggtcgacggcgcggtggatatcgcccgcgaggcggcggatatcattctgctggagaagagcctgatggtactggaggagggggtaatcgaaggccgccgcaccttcgccaacatgctcaagtacatcaaaatgaccgccagctccaacttcggcaacgttttcagcgtgctggtggccagcgccttcctgccgtttctgccgatgctgccgctgcacctgttgattcagaacctgctgtacgatgtctcccaggtggcgatcccgtttgataacgtcgatgatgagcagatccgcaagccgcagcgctggaacccggccgatctcgggcgctttatggtcttctttggaccgatcagctcgattttcgatatcctcaccttcggcctgatgtggtgggtgttccacgccaataccgtggagatgcagaccctgttccagtccggctggtttatcgaagggctgctgtcgcaaacgctgattgtgcacatgatccgcacccggcgcattccgttcgttcagagccgggccgcctggccgctgttcgccatgaccctggtggtgatggcggtgggtatcgcgctgccgttctcgccgctggctagctacctgcagctgcaggccctgccgctgagctacttcccatggctggtggcgatcctggcgggctatatggtgctgacccaggccgtgaagggcttctacagccgccgctacggctggcagtgagggacgcgttttcggatgaaccacgtaaaaaaggcagccactggctgccttttttcatgccgacgagagcgatcagcgacgcacggcgatggcttcgatctcgatcttcacgtctttcggcagacgtgcgacttcaacgcaggagcgcgccgggaaggtggcgttatgctcggtgaagaacgcttcgtaagtggcgttaacggtagcgaaatcgttgaggtctttgacgaatacggtggtcttgacgatatcgccgacggtgaggcctgcggcttcaacgatcgctttcacgttgttcagcgactggcgcgcctgcgcggacacgtcttccgggacgctgccggttttcgggtcgaccgggatctggccagaggtgatgatcatgctgccgaggtcaacgccctgaacgtaggggccaatcgccgctggtgcattttccgtcgcaatagttttgctcatgttatctccagatgaactgagtaatgttacgcaaaatcattcaggttgccgccaggcggtaagcgctgtatcgccggcgcagacgccgcctgaaggacgaagcgtagggtggtagccattatagggaggcctaccaccaataccaaccgcatttagttggccagcaccacataatgagaaaactctttttcgcagtatttgcatttgagtgcgatgtcatcagcgcgttttttcactgcaaaactggaagaaaccggttcggcgtggctgatacagttgctgttcgggcagaccagcacgctgtcgatacgatccggcaggctcgggcgggatttgcccaccacttcgtaatcatcaatgcggtttaccgtcgcctgcggggcgtacagcgacagctggttaacctgctcgtcggtcaggaaggtgttctcgattttaatcaaatccttgcggcccatctcgccggagggcaggttcaggccgatggtgatgcgctggtcggtttcggtcagtttgaacagggtgagcagcttaaagccgacctgcgccgggatatggtcaatcacggtgccgcgtttgatcgcttctacctgcagtttattgtcgtgtgtcatctctcattcccccttacagtgccagctcgctattcagtaccagtgccagtaacgcctggcgggcgaagatgccgttaccggcctgctggaagtaccaggcgtgcggtgttttatcgacatcggtggtgatttcatcaatgcgcggcagcgggtgcagcaccttcatattggcgcgcgccccttcgaggtcggcggcgcgcaggacgaattgcgctttgacgttggcgtattccgacggatccagacgctctttctgcacgcgggtcatgtacagaatatccacttccgccatcacgtcgtcgatggcgctatgcaggctccaggcgatgcctttttcatcgagcatatcgaggatgtactgcggcatggccagcgcgtccggggcgatgaagtagaagcggttgccgttgaatttggccagcgcctgggtcagggagtggacggtacggccatacttcagatcgccgaccatcgccacgttgaggttttcgaggcggccctgggtctcctgaatggtgaacaggtcgagcagggtttgggtcgggtgctggttagcgccgtcgccggcgttcagtaccggcacgccgccggagaattcggtcgccaggcgcgcggcgccctcctgcggatgacgcatcacgatggcgtcgacgtaggtgctgatgacggagatggtatccgccagcgtttccccttttttgcccagtgaggtgttggcgctgtcggaaaagccgaccacgctggcgcccaggcggtgcatcgaggtttcaaaagagaggcgggtgcgggtcgaggcttcaaagaaacagctggcgataaccttatgcttcagcagctcgggttgtggattggctttcagctttgccgccgtcgccagcaccagttcgaggtcttcgcggctgagatcgtttatggaaatgatatgtttttgatatagcgggttagccatgcttatctcctgacgcctgggcaaaaaaaaagccccttaaataaggggcttcgggaatccaatgagcaacggaaagaaaaacggcaggccagcgtctgcattgagacgcgctaagacagaatgtcgtacgcaattggccatgcttcctcccggcaaaacgactggcattatacgcagaccgttatgacgatcaagcgattcattcacaaacaggtaatcgtttgcctgtcgaaaagtgcgccagcgcaaagaagcgtgaaactgtactggtatggcagccgcgatgggggtataacacgataaaatgaaatgctgttttatatttgaggtaagcaatgattattggcaatatccaccatctgcagccatggctgcctgccgcgctgcgcgaggctatcgaacaggttatcgctcaggtcagcgaggcgacgccgctgggtaaacacgctatcgacggcgacaacctgttttatctgatttctgaagacaccaccgagccgcaggccgcgcgccgcgcggaataccatgcccgctatctcgatatccagattgtgctccgcggcagcgaggggatgaccttcagcaccttgccgccaggagagccgcagaccgactggctggcggagaaagacatcgcttttcttgccgaaggccggcaggaaaaaacggtgatccttaacgaaggggattttgtggtgttttatcccggcgaagtgcataaaccgctgtgcgccgttggcgccccggcgaaggtgcgcaaagcggtggtgaagatgctgatggcgtaaaatggcgaaccgaatcccggatgaacgccgtgccatccgggacacagccgcgagcgaggggctatttgctcagcgtcgccaccatcaccgctttgatggtgtgcatccggttttccgcctggtcgaagaccacgctcgccgccgactcaaacacctcgtcagtcacctccatgccgccgtgcaggccgtaatcggcagccatctgtttgcccagcgtggtctggtcgtcgtggaacgccggcaggcagtggaggaacttgacctgcgggttgccggtcagcgccagcatcgcgctgttaacctgatagtcgcgcagcagggcgatacgttcggcccatttttccttcgcctcgcccattgagacccagacgtcggtatagataaaatcggcgcctttcacccctgcggcgatatcttccgtcagggtgatgttgccgccctgctgtttggccagcgcggtgcaggtctccaccagcgcggcctccggccagcaggccgatggcgccaccaggcgcagatccagaccggtcaaggcggcggcttccagcatcgaattgcccatgttgttgcgcgcgtcgccggcgtagaccagcgtcatctggttaaaggctttgcccggcagatgctctttcatggtcagcaggtccgccagcagctgggtggggtggaactcgttggtgaggccgttccacaccggcacgccggcgtattgcgccagggtctctaccacttcctggccgtggccgcggtactgaatgccgtcgtacatccgtccgagcacgcgggcggtgtccttgatcgactctttatggccaatctggctgccgctgggccccagataggtcacgcgggcgccttgatcgtatgcggcaacttcgaaagagcatcgtgtacgggttgagtctttttcgaagatgagcgcgatgttttttcctgccagtttctggacttcgataccgtttttcttatcggctttcagctttgccgccagctcgagcagggcggtgatttctgcaggcgtaaaatcgagtaactttaaaaaatgcttctggtaaaacgcagacatggttccctcacctggcataggccactaattgaattaaaattcaatttatatgtatgaatattcatttgcaagtctgtgatcgaaatctttcactgagaagtggaggcaatgacggcggtatgtgacaatagggataactgccgcacattatgaggaacgagccatggcaaacccggaacacctggaagaacagcgtgaagagacgcgtctgattatcgaagagctgctggaagatggcagcgatccggacgcactgtacacgattgagcatcacctctctgcagacgatttcgaaaccctggagaaagtggcggttgaagcgttcaagctgggctacgaagtgaccgagcccgaagagctggaagtggaagagggtgacatggtcatctgctgcgatattctgagcgaatgcgcgctgaacgcagacctgatcgatgcccaggtggaacagctgatgacgctggcagaaaaatatgacgtcgagtatgacggttggggcacctattatgaggacccgaacggtgaagacggcgacgacgatgacgaagagtatgtcgatgaagacgacgatggtgttcgccactaagtcgcaaatgtcgtagatggatacggcggcgcctgccgccgtatagcaaggaaccttcatggattacccgcagattctttccccgattatcaacttcctgcactgcccgacgccgcaggcgtggattgacgaagcccgcaagccggaaaacctgccgctgctgctgaccgaccacatggtgtgcgagctgaaagcggcgcagaacgccatgctgctggtgcgtcgctacgtcgcggataaagctgacgccgacgaactgttggcctgcctgaagccgtacgaagacttcacctaccgccgggggccggagccggattttgtctccctgcataaacggatcaacaaaagcgccatgccgcagaccgacgacccgtggggccgccagctgctggacagcatgattttgttgattaaagaggaactgcatcacttctggcaggtgcgggagatgatgctggcgcgcgatatcccctacgtcaaaatcaccgccagtaactatgcccgcggcctgcggcgcgaagtgcgctcgcatgagccggtgatgctgatcgataagctgatctgcggcgcctatatcgaggcccgctcctgcgaacgctttgccgccctggcgccgtggctggacgacgatctgcagaagttctacctgtcgctgctgcgctccgaggcgcgtcactatcaggactatctggatctggcgcagaagattgccggagaagatatcagcgagcgggtgcgccagctcggcgaggcggaagcggcgttgatcctccgtccggaggccgagttccgctttcacagcggtgtgccggtagcggcgtaacccacgatattcgggcccggtagtcactaacaccggcagtttcagtagccatggggagagatagcgttgagagcttcagctcgcaatggtacgggccgtaggtcgggtaaggttagccgccacccgacaaaaaaacggcaccgcgagcacgggtaaggtgccattcgggacatacccggctcgcgctacgcttaaccgggctaccgaactgtagccccggtaagcgtagcgctaccggggacgcctgcgatatcgaggcgctacagcgttttcagcatccgtacttcgcagtccacgtggccggtgcagcccagcggtccgtcaatgtgctcgaagccgagatgttcatataagccgatcgcctccgtcaggaaggcggtggtttccagatagcagcgcttaaacccttgttcgcgggcgtagtccagcgccagcagcgccagcttcttcgccagcccctggccgcgggcgctggtcataaaatacattttctgcagctcgcagatatccggctcgctgcaggcgagcggcgcgacgccgccgccgccaaccacttccccctcttgctccaccacccagtaggcggagcccggctggctgtacagctcatacagttcatcgagattcgggtcggcgaccgtatagcctttatcggcggtcaggccatattcagccgagacctggcggatgaccctggcgatggcggcattgtctgccgccgtaatgcgacgcagcaacgtcgccgcggggacgctcgtattcatacaatgactcattacccaaaaaagacgaatgatgatgttaataacatcgcgacaggggaaagcgcaagcgaggatgtttcataaaaaacgccccttgccgggtggcaaggggcgggaggatcacagcgcggcgatcaccgcctgctgttcaatcagcttcgctttcgcttccgcgtagccttccagcttctcgcgctctttagcgatcaccgcttccggcgcgcgggcgacaaagccttcgttggccagcttgctctcgatgcggccaatttcaccttcgattttggccacttctttcgccagacgcgccagctcatcttctttattgatgaggcccgccatcgggatcagcagctcggcgccgtcgacaatcttggtcaccgagaccggacctttatcatcggcaggcagcacggtaatgctttccagacgcgccaggttcagcaggaagctgcggttgtcgttcacacgacgctcggcctctttgctgcagccgcgcagcagcagttccagcggtttgcccggagcgatgttcatttccgcacggatgttacgcacggcgacgatcgcctgcttcagccattcggtgtcggccagcgccgcgtcatccacctgagaagcatcgtactgcgggaacggctgcagcatgatggtgtcggcggtgatcccgcagatcgctttcacgcgctgccagatggtttcggtaatgaacggaatgatcggatgcgccaggcgcagcagaccttccagcacggtgaccagagtatggcgagtcccgcgcagctccgcttcgttgccaccgttcataaccggcttggtcagctccaggtaccagtcgcagaactggttccaggtgaactcatacaggatgccggcggcgatatcgaagcggaagttatccagcgcttcgcgatatgctttcacggtgtggttgaattccgcgatgatccagcggtcggccagggagagcaccatttcgccgccgttgaagccgcaatcctgatcttcggtgttcatcagcacgaagcggctggcgttccacagcttgttacagaagttacggtaaccttccagacgcttcatatcccagttgatgtcgcggccggtagaggccagcgccgccagggtgaagcgcagggcgtcggtgccgtgcggctcgatgccgttcgggaactgtttctcggtacgcttgcggattttatccgccagctgcggctgcatcatgttgccggtacgtttttccagcagctccggcagggtgataccgtcaaccatatccagcgggtcaatgacgttacccttggacttggacatcttctggccttcgtcatcgcggatcagaccggtcatgtagacggtcttaaacggtacctgcggcttgccattttcatctttgatgaagtgcatggtcatcatgatcatgcgggcgatccagaagaagataatgtcgaagccggacaccatcacgctggtcgggtggaactgacgcagggcgtcggtgttttccggccagccgagggtggagaaggtccacagcgcggaggagaaccaggtatcgagaacgtcttcatcctgacgcagggcaacgtcggcgctcaggttgttttcctgacgcacttcgtcttcgctacggcctacgtagacgttgccgtcgttgtcataccatgccgggatgcggtgaccccaccacagctgacgggagatacaccagtcctgaatatcgcgcatccaggagaagtacatattttcgtactgcttcggcacgaactgaatatcgccgttttcaacggcttcgactgctggcttggccagcatgtccgcgcgcacgtaccactggtcggtcagcatcggctcgatcaccacgccgccgcgatcgccgtaagggacggtcaggtcgtgcggtttgatctcttccagcaggccgagggcgtcaaccgccgcaacaacggctttacgcgccgcgaagcgttccagtttctggaactccgccgggatctcgctggagtagacgtcggattcattgcctttggtgtcgtagacttccgcgctttcgcggatgtcgccgtcaaaggtaaggatgttgatcatcggcagctggtgacgacgacccacttcgtagtcgttaaagtcgtgcgccggggtgatcttcacgcagccggtgcctttttccatgtcggcgtgctcgtcgcccacgatcgggatgcggcggttaaccagcggcagcaccacgaatttgccaatcagatctttgtagcgcggatcttccgggttaacggccacgccggtatcgcccaagagggtttccggacgggtggtggcgaccaccaggtaatctttatcgtcagcggttttcgcgccatcggccagcgggtagcggatgtgccacatggaacctttcgattcgcggttttccacttcgaggtcggaaatggcggtgcgcagtttcgggtcccagttaaccaggcgtttgccgcggtagatcaggtcttctttgtacaggcgaacaaagacttctttcacggcattggaaagcccctcgtccatggtgaagcgctcgcgctcccagtccacggagttgccgagacggcgcatctgacgggtaatggtgccgccggattccgctttccactgccagattttgtcgataaaggcgtcgcggccgtagtcgtggcgggttttcccttcttcagcggcaatcttacgctcaaccaccatctgggtagcgatacctgcgtggtcggtaccggcctgccacagggtgtttttgccctgcatgcgctggtagcgaatcatggtatccatgatggtttgctggaaggcatgacccatatgcaaactgccggtgacgttcggcggcgggatcatgatgcagaagctctcctggctttcatcaccattcggtttgaaatagccctgcttttcccagtgctcgtaaagcggctgttcgatatcttgtgggttgtatgtcttttccattatttccaggttgccgtgttcaggttgaaaccagccatgcggtacgccttatagcgttcgcgcgccagttgtttcagattttcttcgtaagggacaaagtctatcacttctgtgaaagcggtggcaaaatctgcaaagttaagccgcaggctgatcagaatatcccgcgggctgctgttgcgcttttgcggccaggcaatctctaccggcgcgccgcctctcgggccttcgcccgccagattatgcggcacaaagctctccggcggccgcgaccacagcgcctcgtcgaggcgaatcgcctgctgttcatcttcgcaggcgatcaggacgcgcttgccgttgcgccaacgttctgcggcaatgtcacacaccagctgctcgacggcgctcaggccatcgacggtggcgtcattgtccagaagatagaacgttgcgtttttcatatatggggcttcttgttgtggatttaaatgcaaagccgggcggcgctacgcttacccggcctacagtgtgctgccgtttgtaggccgggtaaggcatcgccgccacccggcatatcacatcactcttcgccgttaaaacccgcacgattgagcaggaactgcgacagcagcgccaccggacgaccggtcgcgcctttggccttaccggaacgccaggcagtaccggcgatgtcgaggtgcgcccagttgtacttgcgggtgaagcgcgacaggaaacagccggcggtgatcgcgccgccaggacggccgccaatgttcgccatatcggcaaaattggactccagctgatcctggaactcgtcggccagcggcaaacgccatgcgcggtcgcccgccagttcggaggcgccgattagctcatgggccagcgggttatggttcgacatcaggccggtgatgtgatggccgagggcaatcacgcaggccccggtcagcgtcgccacgtcgataaccgcttccggctcgaagcgctcaacgtaggtcaggacgtcgcacagcaccaggcggccttcggcgtcggtgttcagcacttccaccgtctggccggacatagtggtcaggacgtcacccggacgataggcgcggccgccaggcatgttttcacagcccgccagcacgccgatgacgttcagcggcagctgcagttcggcaaccatccgcatcacgccgtacaccgccgccgcgccgcacatgtcgtacttcatctcgtccatgccttcggcaggcttgatggagataccgccggagtcgaaggtcaggcctttaccgaccagcacgatagggcgcgcgtcctcagccgggttacctttatattcgatgaccgacatcagcgactcgttctgcgacccattgccgacggcgaggtaggcgttcatccccagctcgcgcatctgctgttcgccgatcacccgggtgatgacgtttttgctgtaggtatcggccagctgacgcgcctgggaagccagataggcggcgttacagatgttcggcggcatattgccaagatctttcgccgctttgatgccggcggcaatcgccaggccatgctgaatggcgcgttcgccgctggtcagctcgcgacgggtcggcacgttaaagaccattttacgcagcgggcgacgcggctcgcttttgttggtcttcagctggtcgaagctgtacagcgtctctttggcggtttcaaccgcctggcgaactttccagtagttgttacggcctttgacgtgcagctcggtcaggaagcagacggcttccattgagccggtatcattcagggtattgatggttttctggatgacctgcttatactgacgctcatccagctcgcgctctttgccgcagccaatcagcagaatgcgctcagacagaatgtttggcacatggtgcagcaataacgtctggccaggtttgccttccagctcgccgcgacgcagcagggcgctgatgtagccgtcgctgattttatcgagttgttcggcgatgggggagaggcgacgtggttcaaagacgccgaccacgatacaggcgctccgctgcttctccgggctaccgctttttacactgaactccatgcactatgctcctgaatcttaaagacaacagtggtggctacggctatactcgtcgcctttcaagttgcagatgcgccggctgcgcctgcttaccctgacgtggcacattgtgcgcgccaggggccacagccctgctgccttcttacaactcgaaatccattgagtatataattgcaagctttcgtaactcatatccgctgttgcggtgacttcgtgttaatcttaacgttattaaggcctgggttcgtcagaaaagatcctgacatgcagaaccgatgagtcatttaatcttagcgacgttttcgacgaccaaagagaataaatgacgtttaagccatgaaacaagcaattttcctgcactaaaacgggtttttacgggcgtatttatagtgataatcataagatatctggttcgtgagacgctgaaaagccagttggcgatcctattcatcctgttactgattttcttttgtcagaaattagtcaggatcctcggcgccgcggtggatggcgatatcccaaccaatctggtgctctcgctgttggggctcggcatcccggagatggcgcagcttatcctgccgttaagtctgttccttggcctgctgatgaccctcggcaagctgtacaccgaaagtgaaattacggtgatgcacgcctgcggcctgagcaaagccgtgctgatcaaggcggcgatgatccttgcgctgttcaccggcgcggtggcggcggtcaacgttatgtgggcggggccgtggtcgtcgcgccatcaggacgaggtgctggccgaagctaaagccaaccccggtatggcggcgctggcccagggccagttccagcaggccagcgatggtaacgcggtgatgtttatcgaaagcgtcaacggcaaccgcttccatgacgtcttccttgcccagctgcgtccgaaaggcaatgcgcgcccctcggtggtggtggcggattccggcgagctgtcgcagcagaaagacggctcgcaggtggtgaccctcaacaagggcacccgctttgaaggcaccgcgatgctgcgcgacttccgcattaccgacttcaataactatcaggctattatcggccaccaggcggtgagcgccgatccggacgacaccgaacagatggatatgcgcaccttgtggaaaacccacaccgaccgcgcgcgcgccgaactgcactggcgcttcacgctggtggcgaccgtcttcattatggcgctgatggtggtgccgctcagcgtggtgaacccgcgtcagggccgtgtgctgtcgatgctgccggcgatgctgctttacctggtgttcttcctgctgcaaacgtcgattaagtcgaacggcggcaaaggcaaaatggacccggctatctggatgtgggcgattaacctgctctattttgcgctggcggtgctgttaaacctgtgggacacggtgccgatgcgccgcttccgcgcccgttttaataaaggagcggcctgatgcaggcgtttggcgtacttgaccgttatatcggtaagacgattttcaacaccatcatgatgaccctgttcatgctggtgtcgctctccggcattatcaagtttgtcgatcagctgaaaaagtccgggcagggcagctacgatgcgctgggcgctggtctctacaccatcctcagcgtgccgaaggacatccagatcttcttcccgatggcggcgctgcttggcgcgctgctggggctggggatgctggcccagcgcagcgaactggtggtgatgcaggcatccggtttcacccggctgcaggtagcgctggcggtaatgaaaaccgcgatcccgctggtgctgctgaccatggccatcggcgagtgggtggcgccgcagggcgaacagatggcgcgcaactaccgtgcccagcagatgtacggcggctcgctgctctcaacccagcaggggctgtgggcgaaagatggccacaactttgtctatatcgaacgggtgaaaggcaacgatgagctggggggcgtcagcatctatgccttcaacccggagcgtcgtttacagtcggtgcgctatgccgcttcggcaaaattcgatagcgaaaataaagtgtggcgtctgtcgcaggtggatgaatccgacctgaccgatccaaagcaggtgaccgggtcgcagatggtgagcggcacctggaaaaccaacctgacgccggacaaactgggcgtggttgccctggatccggatgcgctgtcgatcagcgggctgcacaactatgtgaaatacctcaagtccagcggccaggatccgggacgctaccagctcaatatgtggagcaaaatcttccagccgctgtcggtggcggtgatgatgctgatggcgctgtcgtttatctttggcccgctgcgtagcgtgccgatgggcgtgcgggtggtgacggggattagcttcggctttatcttctatgtcctcgaccagattttcggcccgctgaccctggtctacggcataccgccgatcatcggcgcgctgttgccgagcgccagcttcttcctgataagcctctggctgatgatgcgcaaggcctagcgggtaagcctgaaacgtaagccccctcagcgatgagggggcttttttttagcgcttgcgtccgcccagcaggctgcccagcatgccgcggacgatctgattggtgacctggcgaaccgcgcttttcgctgcggtctgcacgataccgtcgcgtttaccgcctcgcgggccggtgctgccgaacaggatatctttcaggccgccaagcagcccgtcgtcttccccgctctgctggcccttcgccggcggagccgactgctgcccggtggcgacctgcaccccttgctgcagcatttcgaaagccgactcgcggtccacctcctcctcatacttaccgtacagcggcgagtggttcagcagaccattgcgctcgtcatcgctgaccggccccattcgcgaacagggggcgataaccatcgcccgctcgaccaccgacgggctgcctttctcatcgaggaaggagatcagcgcctcgccggtgcccagctcctggatcgcctgctcggtactgaaggccgggttggcgcgcatggtctgggcggcggttttcaccgccttctggtccttcggcgtaaaggcgcgcagggcatgctgcacgcggttgcccagctggccgagcacggcgtcgggaatatccgccgggttctgcgagacaaagtagacgccgacccccttggagcggataaggcggatcacctgttcaattttatccagcagcacctgcggcgcgtcgttgaacagcagatgcgcctcatcgaagaagaacaccagcttcggtttatcgaggtcgccggcttccggcaggcgctcgtagagctcggagagcatccacagcaggctggcggcgtacagcttcggcatctggtagagcttttcggcgctaaggatattgatcacccctttaccgctggcatcgacgcgcatccagtcggcaatatccagcatcggctcgccgaagaagtgctcggcgccctgttgctccagggtcaacagcccgcgctggatggcgccgatcgaggcgctgttaatattgccgtactggttctggaaagacttggcgttatcgccgataaactgggtgatggcgcggaggtctttgaagtcgagcagcagcaggccgcggtcgtccgcgatgcggaaaataatgttcagtacgccgctctgcacctcgttgagattgagcaggcgcgccagcagcagggggccgagatcggagaccgtcgcccgcaccgggtggcccttctcgccaaagatatcccagagcaccaccgggttggcgtgcggctcccagtcgctgacgccgatcttctccagccgcgcctgcagtttctctgagctctgccccgcggcggcaatgccggtcaggtcgcccttgacgtcggccataaataccggcacgccaatctccgagaacgactcagccagcttctgcagggtgacggttttaccggtgccggtcgcaccggtgataagcccatggcggttggccatcgcgggcagtaaatagagcgcgttatccagcgtgcgcgcaatcaacaggggtgagctcatggtcgattcctccatttatcctgcgacgattataggcaacctcgtcgtccggcgttgggaaaatcgtcacgcgccgcgcacgctgtaccgtgagggtctcaggcgcagtggcgctggatgagcgcgatgctctgctcaatttcgcgctcgatatccgcttcgctccattgcgccagctcgggggcgaagggctcaaaagcgtacaccccctgatagccgcgggcttccagcgctttaacctgctcgcaggtgccgagacgatcctgcggggttagcatgatgcgctcggcatcggtgagctgctcgcgcggacggctatcgtccactcctgaaaggtgcaccagcccgatatccgccacctctacctggctgaactcgtccgccgcctgcgggtaaagatggtgatggaaggtatcgatcagcagcttaaacggcacgcgggcgtcgtggatcagcgtctgcgcctggtgcgcagaacgcagcgagctttgcgggaagcccagcggctccaccaggccgtggatgccatagaaggcgaacagcggcgccaggtcgcgcagggcgcccagggtttcgctggccggcacctcgctgccgtcgttgagcggacagagcaccagcgatttggcgccgatggcctgggcctctttcagcagcgattcggtcaactgccgcacctcttcgctacgacggttaaaggggtagaccgcgttaatcgtcaggatctcgatgtggtagcgcgccgccagctcgcgcacctgctgatggctcagatcgtcggtcacttttccgctgggtaaatcgttgcgcagctcgaccttattcaggcccagacggttcaccagacggaaaaacgcttcaatgctgagcgctggcgcgattttgcggttaatacaaaaacgttgcattgcgatggccataggacactcctgacggaagagggggtaggttcgttcaattggctaacagtcaaaacgtttattccaaaattagcaagaatggaaatgatgaatgtttgagctgtctcgcaaaatatcaccggcaccgactaccggcgcgacagcggcgggaagcctggcgtcgagggaaacgaggcgcgatgcgggaagcgcacaggcgaccggttagcgcaaaatgcgactgttatcaccaaaatgaaatttcatttcacaacaatgttgaaatataaatttcattttactacggttatagcacagcagaatcagcgacgggccggtgtgcgctggcccccttcactatgaggcgagaacatgacgatcacaggaaactttattggcgggaaaaccgttattagcagcagcaacgaaacgatgccggtgtacgacccggcgacgggcaaagcggtgcgcgaagtcacggtgtcaaccgcgcaggaagtctccgaggcgattcaggttgctcgcgatgcgtttgacagctggtcccgtaccacgccgctgcgccgcgcccgcgtgctgttcaacttcaaaatgttgctggagcagcacgtggaagagctggcggggatcatcgtcagcgagcacggtaaggtgtggtcggatgcgctgggcgagctgacccgcggtatggaagtggtcgaattcgcctgcgggatcccgcacctgattaaaggcgaatactcctctgacgtcggcaccggcgtcgacagctactcgctgatgcagcccctgggcgtggtggcagggatcaccccgtttaacttcccggcgatggtgccgatgtggatgttcccgctggcgctggcctgcggcaacagtttcgtcctcaagccgcccgcgctggcgccgacggccgctgtgcgtctggcagagctgctgaaagaggccggtctgccggacggcgtgtttaacgtcgtgcactgcagcaatgaagatgccgagcagctgtacactgacccgcgtattgcggcggtgagcttcgtcggctcctccggcgtggcggagtatatctataagaccgccagcgcccacggcaagcgagtgcaggccttcggcgccgccaaaaaccacgcgattgtgatgccggatgccgatctcgacgccaccgttaacgccattatgggcggcgcttttggctccgcaggcgagcgctgcatggcgctgccggtggtggtggcggtgggagatgaaaccgccgacaaactgatcgcccgcctgaagccgctggtggaagcgctgaaagtaggtccgggctgcatgcgcggccaggaagagaacgagatgggaccggtggtgtctgatacccaccagaaaaaagtgctcggctatattgataaaggcgaaagcgaaggggcaaaactggtggtcgatggccgcaaactgcgcgtgccgggttacgacgcgggctactatgtcggcggcaccctgttcgatcacgtcaccccggagatgaccatctggcgcgaagagatctttggcccggtgctggggattgtgcgcgcggcggactatgacagcgcccttgagctggtcaacagccacgaatttggcaacggcagcgccgttttcaccagcaacggccacaccgcgcgtgaattcgtccacgacgtgcaggcggggatggtcggggtgaacgtgccggtcccggtgccgatggcgttccacagcttcggcggctggaagcgctcggtgtttggcgcgttgaacgtccacgggccggacggcgtgcgcttctacacgcgcatgaagaccgccactgtacgctggccggcagggcagcagaccgtatctgaattcagcatgccgacgttaggttaatcggcgaaggagagcgccatgtcgttactggctaaatcgcgaaaagagggacagatccagcatattacgccgcaaagcgccggttggcgctatatcggctttgatgtctggatgttgaaaaaagggcagaccgtgacgctggagagcggcgatcgcgagctgtgcctggtgctggtcgccgggctggcgtcggtgaaaacgcaacatgccgatttcccgaatctcggtaaacggatgtcgccgtttgaacgcaccccgccgtggtcggtctacgtcccgccgcaggataaagttgaggtgaccgccgattccgatctggagctggcggtatgcagcgcgccgggcaaaggcagcttcccggcacgcctcattcggccggaagacgtcggggtagagcaccgtgggaaagggcgcaatcagcgccgggtgcataatattctgccggacagcgccgaggcggactgcctgttggtggtggaagtctacaccgacgagggggccaccagctcgtggccgtcgcataagcatgataccgcccagccgggcaaagagacgcagctggaagaaacctactatcaccgcttcgatccgccgcagggctttgccttccagcgggtctacaccgacgaccgcagcctggacgcctgtatggcgccctacaaccacgatgtggtgatggtgccgcgcggttaccatccggtggcggcgattgccggttacgacagctactatctgaacgtgatggccgggccggaccggaaatggctgttcacctgggaagatgaccacgcctggatcaacacgccggagtacccgcgccacgactgacgcgcggtgcagaagcggataaggaaggccggttagcgatgctaaccggccttcctgtttgagggcggtgggtgttttttcgcgaaacgctccgcggaatcccactccccgacccggcaagcgcagcgccgccggggaggacacctccggcgccatacccgcctttgtgccggatggcgctacgcttatccggcctacgggagcctcccgtaagctcctataccccaggcccggcaagcgcagcgccgccggggaggacaccgcagataccgtagccatttttgtgccggatggcggcacaaatgccttatccggcctacggcatcctcccgtaagctcctataccgtaggcccggcaagcgcagcgccgccgggcgatgaccacaggcacggcgctgcttttatgccgggcggcggctcacgccttgcccggcatacggttcgtgcgacctgccgttaatttattcaccattgttgctgaaactgccggtgttgcggcctcaacatcgctgagacgttcccggaaggccggggcagcccgcatggatgcgggctgagggccgtgttttgcacggacgctgcctcggcccgacccgaagcctgcagggataagtcgaagggaccgcgtagcggcgattttgctggccggagcccgggggtacagggggcggcggcctgtgcgctccctgcgccatgccaggcataacgcagaagattaaccgggagcgcaatgtgcgctgaaatcacatgcgacaaacgcttttcccggattaatagagttgcataccaataacattatctccggcaccccgcaggcgcatataccccaggcccggcaagcgcagcgccgccgggcaggacaccgcagacaccatacccgcctttgtgccggatggcgctacgcttatccggcctacggcatcctcccgtaagcctatactgcgccgccgagtaacaaacgccaggcagcctatctcacgccttctgcttggcctcggactcctggctgctgttcagcgccagcgaaaccgccagcgtctgggccagacacagggaagcaacctgcgagcggaagccatccacctgcgcttcacgcaccacaaagcagacatcgctgaaggccgccagcgggctgacctggctgtcggtaatggcgatctgccgcgctttgcgctgcgcgcccagctccaccagctcgaccacttcccgggcgtacggcgagaagctcaccgccactaccacgtctttcggaccgaccaggctcagctgctcggtgaacatgccgccgaggccgtcgatcagaaaggctttgcgatcgaggtgacgcagcgcataggtcagataggaggcgacgctaaacgaccggcgcagaccaatgacgtaaatattttccgcctcgcccagcagggccaccgcgcgctccagatcatcgctggaggtctgcatcgccagctgctgcagcgcctggttgttcaccatcgtgaacatattgaggatttccgttggcgtttccggcgggctggactcatcgctggtggtctggcggaacagacgggcgcgctcggtatagttggcggtctcttccatcaaatgttgcttgaacatctgtttcatttcgttaaagccgctgaagccgaaggcgttggcaaaacgaatcaacgtggaagggggaacatccgcctgttgcgcaatggaggccacggtatcgaaagccacgctattgctgttatcaaggatatagcgggcgacctgtttcaggcgtttgcttaacgtatcgtagcgacgcctgatttcatcctgcaggatggtcagctgtgttgggttattggccataaagtgcgctctgagaaaatggaaggaatatggcttccagtgtaccaaatgaagcgaatttttcatttattgcgacgaaatacgcgattcatttcacgaagaaacagaaaaacgcccgctccgcaaggtgacggagacgggcgtcgggggatcagcggcgggcttcgcgccagtagccaatgagcgtcaggtagttgcgtttcacttcctctatcagggcctcatcgctgagctcaccctgcatccagcgccgcgacggctggccaaagatggtgcgcccgacggcgaaacctttgatcatcgggtgtgcggccgcctcggcgaaaccggcgcgcagtttgtcggaaggcgcgtcaagcccgaggatcaggatcccgcggctccacggatcttcgcgctcgatgagggcggtgatctgctgccagctggcgctggagagcggcggcagcttccaccagtccggtttgatccccagctgataaaagtgttccagcatagtgtggtaatggcgctcgtctttgtccgggccattttccggcaggatcacctccagcagcagttcatggcctgacttgttacaggcctgccagacctcgagcagcagggcgtcctgctctgcacgcagcgccgccgggtcgtccgggtgatagaagaccaggcatttgacgacatgctccagcggccagtcgatcagctgcgagccgatgttgccatgctccagacgcagcggtcgcgagctgggcagttcgatagggcgcccgatccaccagcccttgccggtaatggcgttgagcgcacgctggccgtaggtgccgtcggccagaatgccgctgcgctgatcgagacctgcctcctgcgccgccgcttcggccgcggccaacaacagcagcttgagctgcggaatgcaggcttcgtcgcgcccggtctcccgcgccagatcggccagctgtttgcgatggtcaaaggcgaaaatgcacagctccggccactgctgacggcggccggtgacccggtgcaggtggttgaggcgctcgtcgacgtccgggcgcggcaccgattcggcgcgctgcaggtagtcatcaagttcgactttggtcggcatcgccggcgcgcagccgtggcgggagactaccagcgccccgcaggcgttggcataacggcaagcctgctcccagccttcgtcgttgagccagccgcgcagcagacccgacataaaggcatctccggcgcccagcacgttgagaacctccacgcgcacgccctgctgtagcggcacctggtcccagctgtccgggatgtcgccttccagcaccacgcagcccatcggcccgcgcttgcagacgagggtggctttggtggcattgcgcacatttttcagcgcggtcagggtatcggtgctgcccccggcaatatgaaactcttcttcggttcccaccaccaaatcgaacagatgcagcacttcctgcagctggctggtgaccggtccggactcaatgaaacgggtttcgccatcgccgagcgaggtgagcccccacagcaccggacggtaatcgatatccagcgcggtgcgcaggccgtgacggcgggcgtactccagcgccttcagcaccgcggcgcgggtgttggcgtgcgacaggtgggtgccagtcaccgccagcgcccgggaggaggcaatatactcctcgctaatgtcgtcaggcgttaaggccatatcggcgcagttatcgcggtagaaaatcagggggaaggtctcctgatccttaatccccagcatcaccagcgcggtcaggcgagatttgtcggtaatcagatactcggtatccaccccggcgcggttgagcgtttcgcgcaggaaacggccgttgtgttcatcgccaacgcgcgccagcatggccgatttcagcccctgaatcgcggtgccaaaggccacgttgccggaggagccgcccagatatttcgcgaaactggcaacgtcttctagccgcgaaccaatctgctgggcatagaggtcgacggccacccgacctatacagatgacgtcgagccgctttactgctgcattcatagctaggatttcctttttggtgtctgctgcctggaagggtcgggatcccgacgtcgactccgtgaacagcctgagggttattggttacccttagtttgagaaataaatatttcatttgcaaactcgttcgaaattaaaaaaccaaaagtgtgagggatctaccactctgccgcactgagcctcgcgcgagcgcggatcgccccctctgtcgacccgggggaaaatgaaacgccaaatggcatccatttacctatgatttttaaggggatattgccgtctggtgcggcaaaaaagggcccgaaaacgtgtctggaatgtaagtgaaacgtatgaaatgggtagagagtttgatccttctcgcaaaatgaaatatttcttctgtatttgtatttaatgaaaaaaatgtttgcctataatccacaggtattccagtgacgtgaacgacggccccggcggcatcggcgcgacgccacacacaaatactgaacaataaggattgtgcatcatgggcaaactgagactgacaacggcgcaggcgctggtgaagttcctcgataaccagtacctggaagtggatggcgtagagctgaagttcgtgaaaggcattttcgcgattttcggccatggcaacgtcctggggctggggcaggcgctggagcaggacagcggcgatatgcgcgtctatcaggggcgcaacgagcaggggatggcccacgcggccaccggttttgcccgccaggccctgcgccggcagattatcgcctgcacctcctccatcggtccgggagcggccaacatgatcaccgccgccggcaccgccagcgccaaccgcatcccactgctgctgctgccgggcgatgtcttcgccacccgccagccggatccggtgctccagcagattgaacagagctacgatctcagcatcagcaccaatgacgctttccgcgcagtcagcaaatactgggaccgtattacccgcccggaacagctgatgagcgcctgcatcaacgccatgcgcgtcctgaccgacccggcggaaaccggcgcggtgacgctatgcctgccgcaggacgtgcagggcgaagcctgggattacccggaatccttctttgcgcgccgcgtgcaccgtctcgaccgccgcccggccagcgccgcgcagctggcggacgccgtggcggccatcaaagccagccgtaaaccgctgatcgtctgcggcggcggggtgaaatactccggcgcgggcgaagcgctgtcccgtttcgccgagcgctacggggtgcccttcgccgaaacccaggccgggaaggggacggtggtctcgtctcaccccctgaacgtcggcggcgtcggcgaaacgggctgcctggcggcgaacctgctggcgaaagaggccgacctggtgatcggcgtcggcacccgcttcagcgattttaccaccgcctcgaaatggattttccagcacccggaggtgcgtttcctgaatattaacgtcagcaacttcgacgcctggaagctggacggcattgccatgctggcggacgcccgggaagcgatgaccgctctcgacgcggcgctggcggacagcggctggcaggccggctggggcgcgcagatcgagagcgtgcagagccgtcagttaaaagagacccagcgcgtctaccaggcggtgtggcaggagaaatcctttgtgccggagatcgacgatcatctcgatcgtgaatcggtgtatcgcgagttccgccagatcaccgactccaccctgacccagagcagcgttcttggggtactgaatgaaacgctgccggccgaggcggtgatcgtcgcggcggcgggcagcctgccaggcgatctgcagcgcgtctggcgcaaccgcgcggaaaacacctaccacgtggagtacggctactcctgcatgggatatgaagtcaacgccgcgctgggcgtgaagctggcgcagccgcagagcgaagtctactccctggtcggcgatggctccttcatgatgctgcactctgagctggtcacctccctgcaggagcgggcgaagatcaacgtcgtgctattcgacaacatggccaacggctgcatcaacaacctgcagatggagcacgggatggacagcttcggcaccgagttccgctaccgtcagccggaaaccggccagctgcagggcggcctggtgccggtggacttcgccaccatcgccgccggctacggctgcaaaacctggcgcgtcactaccctggacgaactgcgccacgcgctggacgccgcccgtcgcgaaacggtcagcactctgattgatattaaagtgctgccgaagaccatggtgcacaaatacggcagctggtggaacgtcggagtcgcccagacggcgctctctgagcggatccgcaaggtggcgcaaatgattaatgaaaagcgcgcccaggcgcgtgattactaaaacgaacatccactctgaatcctacagacttacggagaaaaccattatgtcgctcaaattaggtgtcatcggcgctggcgctatcggtaaagaacacatccgtcgctgcacccaggttctgcagggcgccaccgttgtggcggtgtctgatatcaatgccgacaacgcccgtgcggcggtcgcgctgccgggcgtgcaggcggaagtctacgccgacggccacgacgtgattaacgccagcgatgtcgatgccatcctggtcacctcctgggacccgacccacgaagagtacaccctggccgccatcgccgccggtaagccggtgttctgcgaaaaaccgctggcgatgaccgcggaaggctgccgccgcatcgtcgatgccgaaatgaaggccggccgtcgcctggtgcaggttggttttatgcgcccgtacgacgaaggctatctggcgctgaaaaaagtgatcgacgatggcgatatcggcgcgccgctgatgctgcgctgcgcccaccgcaaccagtcggtcggcgagaactacaccaccgatatggcgatcaccaacaccctgatccacgagctggacgtgctgcgctggctgctgaacgatgactaccgttccgtgcaggtgcgcttcccgcgctccacctcgcacacccatgcgcgcctgaaagatccgcagatcgtctcctttgaaaccaaaaaaggcaccctgatcgacgtcgaagtgttcgtgaactgccagtacgggtatgacatccagtgcgaagtggtcggcgaaaccgggattgcccgtctgccggagccgtcggccgtccagatgcgcaagtccgccagcctgtcgaccgccattctcaccgactggaaagaccgctttatcaaagcctacgacgtcgagctgcaggcctttatcaacgacgtcaaagccggccagctgcacggcccgtcggcctgggacggctacgcggcgtcggtggcggcggacgcctgcattaaagcgcagggaaccagcgagccggttgaggtgacgctgcctgagtgcccggcattctacaaacgttaagcgcgttttgctgacggaacttctttgcacaggtaacgacgatgaaaattgcctttgatgtggatgtcattaaggacctcgggatcacccgcatggtccatcaggtagcggagtggggctacaagtacattgaacagtcgccgcacccgcagattaacccgttctacaagcacccgcgcgccagccgggagatcatggcggagtacaagcaggcgctgcgcgataccggtcttgagctgtcgtcgtttatctgcgtctaccgctggtccggcccggacgaactgcgccgtcaggcggcggtgaaaaactggaaacggctggtggaaattgcggtggagatgggcgttcaggtgatcaacaccgagttctccggcgatccgaatcagcctgagatctgcgatgaaatgttctatcgctcaatggaagagctgttgccgatttttgagcgggaaggcatccgcgtggagatccaggcgcatccctgggatttctgcgaagagaacaatgaaaccgtcgatatcgtgaagtcgttccgcagcgataacgtgaagtacgtctacagcgtgccgcacacctttttttacgacaaaggcgtcggcgacgtggcgagcatgctgcgctatgccgggagcgatctctcccatgtcctgattgcggatacccgcaaccatacgaaacattgccgctatatcgttaacccgccgggcgtggatgccgtggtgcaccagcacgtaggcgtcggggaaggggatgtggatttcgacgcgctattccgcaccctgcgcgaaatgaaattcgccgagcagaccttcaaggtcggcggggcgccgattgtcgccacctcgctgtttggctacccggaaaaaatgaaataccaggcagtggaaacccgtgaacttattgaacgtgaattgctgcgccggtaaggcgcagcggcaggagccctactatgaacaaagataacgtcaaactggctatcgccccgatcggctggactaacgatgatatgccggagctcggcagcgaaaacaccttccagcagatcgtcagcgaaatggcgctggccggctttaccggtagcgaagtcggcagcaaatatccgcgcgacccggcggtcctcaagccgatgctggacatccgcggcattcagatctgcaacgcctggttcagcacctttttcgccaacggccagcgggaaaaaaccattgatgaattcgtcaatcacatgaacttccttcatgcgatgggggcgaaagtgattggctgctccgagcagagcggcagcatccaggggctggataaaccgatcctcggcgatgcgaagccgtgcttcagcgacgaagagtggcagcgggtggcggaaggctataacaccctcggccgcctggcggcggagaaggggatgcaggtctgtctgcatcaccacatgggcaccggcattcagaccaccgcggaaatcgacaaatttatgtcgctggtggacgagcgcgtcttcctgctgttcgacaccggccacgcctggtattccgaaggcggcgaagcgccgatgctggcgatcctcaaaaagtatctgccgcgcatcaaccacgttcacctgaaagacgtccgtccgccggtgatcgaccaggtgcgccgcgacggcctgtcgttcctcgacggcgtgaaaaaaggcaccttcaccgtcccgggcgacggggtgatcgatttccgtccggtgttcaagctgctggacgactttggctataaaggctggatggtagtggaagccgagcaggatcctgctctggccaatcctttcgaatacgccgtcaaagcgcgcaaatatattcgcgaaacggcagggatctaatcgttgtgacattttcaggccataccgggtatggcctgcttttttcctttcacaaccggacccagggcttaaccacagcgccggacagttccctctccctcagggagagggccagggtgaggatggcgatgacgggtaaagcgtcacttcacttccgccagcgcggtcttatccacatacggtttcatcagcgcgtcggcttccttctgcgccgcctgcaccgccgcttccggcgtcactttggcatcgttaaccaccgccgccagctggttctccatcgccttacgcaccgccacggtctcccaggtggagtaccacggatgggcgtacttcagctgctcaagggcgatcgccgcccgcggatcctgctgcagataggccttcatctccggcgtatcgtatgacgccttgcgcggcgagaagtagccggtgaagcggctccacgcgccgttcacgtcggggctcaccagataggtcaggaactgatacgccgctttcttctgcgcatcgctgatgcctttaaaactcaccaggctggcgccgccgatcggcaccgcgcgctgctctttggccggcagcatcgccaccccaagctcaaaatctttgctgttctcgcgcataaagcccagcgcgccagtgctgagcatcgccatcccgagcttgccggagaagaacgcggcgctgatctgcttcgagttcaagaccccggacggcatcaccttgtccttgtagatcagatcctgccagaagcgcagagcgccgatggcggtcggcgagttgtaatagacctcgcccggatagtcttcgttaaagtatttcccgccgttggcgcgcaccagcgccgagaagatccagccgccgtagtcgtcgttagtcgacggcagcatgatcccccactggcctttgctctcgtcggtcagctttttggcatcggccagcagctcggcccaggtctgcggcggctgtttgatcccggcccgatcgagcatcgtcttgttgtagtagaggatcggcgtcgagttatggaacgggatcgcataggtggtgcccatcacctgggcgttcttatgcatcgcgggccagaattccttgtgcagaaaatcgccggccttttgatcgccatatctaaacagctcatccatcggcaggatctcatccttcagcgccagatcggtggtgaagttggcggacatgatcaccagcgccggcggctggccggccttctgcgccgattcggctttgatcttggttgtgtcgtagttgccggagaagatcccgcgtacttcgacatcctgctgtgagtcgttgaattgcttaatgacgcgggtcatctccatggtcagcttgccgtccaccggcgccgggaacatgaagtctattttctctttcgccagcgccgcgccgctcagggcgaggctgagcccaaccgcgactagcgtaaaaggtttaaacatgattacactccatcaacaaattatgctgggtctcagcatgaaaaagatgcacatcggcaggtgagaagccgaccagtagcgactcgcctttctccggcaccgtgccgcggtggcggcggctaaagcgcagggtgccgatcggggtgctgacgtggagcaggtaatcggcccccatcagttctcgttgcagaacggtggccggcaggcgcagatggccctcctccacgcggtcggtaatatgttccgggcgaacgcccagccagacgcgggtctgatcccggtggcgcggcggcagcggatggcgctgttctcccaacagtacttcaccgttggcgcagggcagcgacagcaggttcatcgccggcgaaccgataaacccggccacgaacaggttggccgggttggcgtacagatactccgggcgcccgacctgctgcacgtggccgccgttcatcaccacgatgcggtcggccatcgacatcgcctcggtctgatcgtgggtcacatagatggtgctggttttcagctgctggtggagcgccataatgctgtcgcgcacttcgctgcgcaggcgggcgtcgaggttggagagcggctcgtccatcaggaacagccgcggattgcgcacaatcgcccgggccatcgccactcgctggcgctggccgccggagagcttcgccggtttgcggtcgagcagcgcctccagctgcagcatctgcgccactttgtccacccgcggctgccagctgcttttctcttccttgcgcaccttcatgccgaaggtgatgttgtcgcgcaccgacagatgcggaaacagggcatagttctggaagatcatcgcgaagttgcgctcgcgcggcgtggtggcggtgatgttctcatcatgcagccagatttggccttcgctgaccggctccaggccggcgagcaggcgtagcagggtgcttttcccgcagcccgacgggccgaccagcaccacgaattcaccttcgtgaatatccagcgacagggcgctgagcgccggtttgccgtcgaaacgtttactgatgttttgcagactgagcatggcggttagcgctcttccgttgggcaactgatgttttcgtcgtacagccacggcccggcgtagtgggccagcgagtgctggtagctcacccactgctcaccgacctgacggtgcatcaggcacgaggccggagagaggtcgtaatagggccgggtgtcttcgtggcagtacggcacctgatgaacggtgccgggaatggtggagatcagcgcctggcgatactgggtcatggtcaggctgtggttatggccgcagaagatgcgcgtcagcgacgggaaacgctccaccagcgccagcagacggtggccgttttcgcaggcgatcgggtccatctgcgcattgcccagcggcagcggcgggtggtgcataaagatcgttgccggtttgtcgccgccctcgaacagctgggcctccagccagccgatggtctcgtcggtcagccagccttttgacgtgccggcgcggctggagtcaataaacagcaggcgggtggcgaagtcatccaccgcatagcgcatattttgcggatcgttgcccagctgcgggcacagcgggtgaagatgctcgagaaaatgggctttgtcgtcgtggttgccggggatcagatacagcggatagttcaggctgccgaggatctggcgggccacctgatactcctccgggcggccgcagttgacgatatccccgctcaccaccaccgcgtccgggcgctcgcgcagcgcgttaagctgggagaccacgtcggcgttggcggcattgacgtcgataaagccgtacagcttctcgccgcggctgcggaaatgggtatcggaaatgtgcgctaacagcatgaatcactccttatttgatcccggagaagccgaagctccgcaggaactgtttctgaaaaaggatgaacgccagcatcagcggcaggcagaccatcagcgtcccggcgccgatggtgccccactggccgccggattcggcgcccatggcgaaggagaccagcccgacggtcagcacctgcttatcgggatcgttgagcatcatcagcggccacaggtactcgttccagtggtaggtaatgctgacggtggcgaaggccagcaccgacggccaggacatcggcagcagcacgcggaacagcacctgccaccagcggcagccctccatcagcgccgcctcttccagctctttcggaatggcgaggaacgcctgacgcatcaggaacacgccgaacgccgaggtgaagtagggcatcatcaccccggtgagggtgttgagcaggccgaaggttttcagggtcagcatgtttggcaccatcatcaccaccggcatgatcatcagctgcaccaggaacaggagaaacagcgtctgcttgccgcgaaactcgtggcaggcgaagacgtacccggcggtggtgatggtcaacagctgcacgaagaaggtgccaaaggtgaagataagggtgtttgcgtacaggctcagccagtcggcgctctgccaggcgtcgcggaagttatcgagagtcagcggcaggcgcggcagcagcgacgccatatcgtcgccgaaggtggtagcgctgaacgaggtcgccagcatccagataaacgggctgacccacagcagcgccaggcagcacattaatactgtgagcgtaaagggcgacgagcggcgcaggcgcagccacagcggacgggcggcggcgggcgtgcggaccagcagcggcgagatttcagcgctcatagtgggctcctttctccagcagtttcaggttaatcagcgagaaggcgaacagcccggccagggtgaggaaggtggcggcggaggctttgccgaggtcgtgggtatcccaggcgagattctggatgtaatagagcagcacggtggtggcgttgtccggcccgccgcgggtcatcaccgccacgtggtcgatctgggtgatggagtagatcagcgcggtggtgatcacaaagctcagggtcgggcgcagcagcggtagcgtgaccttaaaaaagacctgcgtgcgggtagccccctccatcagcgccgcttcccgcgtcgaggccggaatgctctgcagcccggcgaggaaaaacagcatgtagtagccggcgaacttccacacgccgatcagcgccagggccagcagcgcgctattgctgcgccccagccagttgttgttcattgggccaaacagcttcgccagatagtggtcgagcaggccgaggccgggcataaagataaacagccacagcgcggcggcgctgaccatcgggataatcatcgggaagaaaaaggcggtgcgcagccagcggttgacgcgatggttctcgctcagggcgaccgccagcagcagggcgagggtcaccccgggcaccaccgtcagcaggatatagagcagattattgaccagcgactgccagaaaacgccgtcggcaaacaggcgggcgaagttatccagcccgacgtactgcgcgccgtcgctggccatgcgggtatcaaacaggctgtcatacaccgaacgccccagcgggaaccaggtaaacagcagtaaaaacagcagggaaggcgacaggatcagccagggaagccaggtctttctcatggtgacgcgcatctcgttcagccatttatcgaagcccggattgtgggaagcaatgactacagaggcatggcggggagatgacggtttgatgaagcgacggggaaaacgccgggcgagcgggccgcccggcgggagagaaccatcagaagtcggctttcagcaccgcgcggtagcgggctttgccttcacgaacgtgcttcagcgcttcgttaatttgcgacatcgggaacagctcggtggtcggagccactttgctgcgcccggcaaacttcatcagcgtgcgcagttcggacgggttaccggtcgccgagccggagatgctgcggtcgccgccgatcagggtaaaggccggtaccgggaacggcttcatcaccgcgccgacggtgtggaagttgccgccgtaagccagggcttcgaagtacggctgccagtcgaggtccaccgccacggtgttgatgatcaggtcgaactgaccggccagcgcttttaaggcttccggatcgcggctgttgaccacgcgatcggcgcccatcgccagcacttcctgctctttggccgggttggagctgaaggcggtcacttccgcgcccatcgcccgcagcagcttaatggcgatatggccgaggccgccgatgccgatcaccccgacgcggctggtggcggtcacgtggtgggtcagcagcggtttaaagacggtgatgccgccgcacagcatcgggccggcggacgccagatcgatgctctccggcagggggatcacccactgccagtcggcgcgcagcttattggcgaagccgccgcggttgagaatggtcggcaccgagccttccagacagttgatctggttgccgctgatgcaggcgtcgcaatggccgcagctgcgcgccgtccagccgatgccgaccttctggccaatcttcagccctttatcctgcgccgcgctgcccagcgccgccacccggccaatcacctcgtgaccggccaccagcggatagctcgacatcccccattcgttgtcgatcatcgacaggtccgaatggcagatcccgcagtattccacttcaacttcgacatcttccggctgcagctcaccggcatcgtattcccacagcgacagatcggcgcccgcttctttggcggcgtagcttttaatgatgctcatgttcatttccttggggttggcgtgataacccagaaagtgtagagcatggtattccccggcgcttggcaatcggaggggtagcgaagcgggcggaccagccgcccgttaaggtcagcggctggccagcggccactgattaaggcggatgccgcgctgcggggcgttctcggcaaaatcatccagcaccgcccgcacgtccgggtcgaggtagccgacgctgtcgtgctcgacgatcaccacgctcttttccggaatcttcgccagcagggctagcagatgcggattgtgcataaaggtcagattctgctggatgcgcagcacgtagtggtcatcgtagcgcgccagctgcagcgagtggcgatggctgcgccagaggctgaacgccatctgggtggcaagaccaatcccgatccccgccagcatgccgcaggcgataatcccgccgatggtggcgaggaacgggacgtactgcgccgccccctggcggaactgctcgatgaacagccgcggggtcgccagcttatagccggtatacagcagcacggcggcgaggctggcgagcgggattaaggttagcaggccgctgaaccacaggccgcagattaacagcaggaggccgtggataaagatcgacagtttgctctgcgcgccattgctgacgttcaccgagctgcggacgatcaccgcggtgatcggcatcgcccccagcacaccggagagcaggttgccgacgccctgggcgaccatttcacggttcggcgaaggcggcggattttgcgggcgcagctttttcagcgcctcctggctgagcagggtttcgaggctggcgaccagcgccagggtcaccgccaccacccacaccgacggattgcgccacgcgctccacgccggagattccagctcgcccagcaggtcgccgaggctgccgaacgccggcagggtaatacgcggcagagcggccagctgctgcggcgcaaaatgggtcagcagcagggtggtcacgcagccgagcaggacggcgatcagcggcccggggatccagcgcaggctcttcacccggcggataagcggcgagccccacagccagagcacgagcaggccgcccgcggcgacggcaaacgcagtgacggagacagcggcattgccctgaaccacttcggcaagtccggtctcttccgccgtgccgagcgcgacggggatctgctgcataatcagcaggatgccgatcgccgccagcatgcctttgatgacgctggcgggaaccagcgagataaagcgcccggcccgcagaatgccgaacagcagctgcagcacgccggccagcaccagcgccatcaggaagagggagaaggaacccagggattcaatagcggcgacgacgatggtgaccagtccggcggcggggccgctgacggcgaagcgggaggggctgagggtggtgacgaccaggccgccgatgatgccggtcagcaggccgacgaagggcggtaagccgctggcctgggcgatgccgaggcacagcggcagggcgacaaggaagacgacgatgccggcgagagagtcctgacgaagcgtgttcatggggcgtgctcctgcggtgagaggtgttcgacgagggtggttaaatggccggaagccagatcgtagacgcagccgtgcaggctgagcggtagcccgctggcgagcaccgtctgcaccggttcactctccagcagacgggcgaactgggcgcgaacgttggcttccaccagggcgtccagcgcatggcgagaacgctccgcgttggcgctggcgctggtgctggcgccgggggaggccgcaatacaacagtcatcggcgatctgcacaatttcgtgatgcagggtgtggcgcagctggccgatgcgacgagccagcgccgaggactcctgcgccagcggcagggtgggcagagagagcgccgcctgtacgccgccgcagccgtagtggccgcagagcaccacccgctccacctcaaggtagtggagggcatactgcaggacgctcatgacgttgtcgtcggcagggtcgagcatgttggcgatattgcggtggacaaagagctcgccgggctggctgccggtgagcacctcggcgggcacgcggctgtcggagcagccgatccacagcgagtggggccgctgcccgtcgatccatttttcgaaatagtccggatcatgctgacacttctgcagcgcccagctgcggttgcgggccagcaaaggttttaacgtcgtcacaagtattctcctgagttaattcatcgagtgaatatgtccatcaagactcgtacagcgactagtaaaaatagtgtttaccggaacccttcacgcctgaggaaaatcctggaataaacggcaaaaagaaaacttttcattaatgtaaagttataaaaatattgatgaaattaatgtttgtcttcggggtagatgaataacaaaaaagcattggctaaaactttctggaatatattggagtggtggtgggtggggttgggagaatagttggggagtggatattgaggatgggtggggaacgttgggttgtgctgaggatgcgggtgagagtgggatgagaacaagttgagataagattgagtgaggtttggggggatcaaggggaaaggggagtggctggcaggtggagttggggttgtgggggttgtgagaggagggttgctggtggcagtcgcgctgtggaacggcagcaaaaggtgacgctgcgcaggatagcgctgtttttttcaacacttagcgcaatgacgacacgctgtcgcttgcatgaccgccgccgacaggtataatccagaacgtttccgcatccccttcagtgccgaagtggcgaaatcggtagacgcagttgattcaaaatcaaccgtagaaatacgtgccggttcgagtccggccttcggcaccaagtgatgcaataattagctacctaagggtggctttttttgtgtccattttcgtccaaattcgtccatatccgtctgtaattcaaagataatttatttttcgataataactatttttattttgtggtctttccgtgttggtcatttttcatccattgacatccacgcgatttgggggccaaattgggggcttagacgtagttcgataatagtgaggcccccaaatggcactaacagatcgcgctatagtccacgccaagccttgtggcaagccgtataagctcagtgactcgcatggactttacctgctggttaaccctaacggttcaaaacgctggtacatcaagtaccgctttgtaaacaaagagaaaaagctcgctttaggaccttatccgcttttgacgcttgcacaggcaagacgcatgcgtgaagaggcccaattactgctgatttctggcatcgatccgagcgcacaccgaaaggctgaacgccttgcgataacgccggaacatacgtttgagtctgtggcacgcgaatgggtcaccagtaacgtgaactggtcggcggaacataagaagcgggtgctgcgttatttcgagctctatgtgttccccacgaacggcagctgtgacatcacaaaaatgaaggtcaaagatctgctggtgcccatcaaggaggtggagaaagcgggcaaactggatgttgcttcccggcttcagcagcgcactgcctgcgtgatgcgctacgccgtccagaacggcattatcgatcataaccctgcatcagatttaaccggcgcggtttccacgcccaaagtacgtcaccaccctgcattagatttgaatcttatccctgatttcctggaaagagtcgacgactttaaaggacgtaagttgactcaactggcggtaaagctggcgctactgctattcatccgctccagcgaactgcgctttgcccgctgggatgaaattgacctgcgtaacgccatgtggaccattcccgccgagcgcgaaccgatccctggcgttaaatattcagcgcgtggggcgaagatgcactccccacacctggtcccattgtcacgtcaggccatcgaactgctgcacaaggtgcggcagcactgccgaccgggaactgaattggtgttccccggcgatcataactaccgcaaaccgatgagtgaaaacactatcaacaaagcgctgcgtgtgatgggctacgacacccagaaagatgtctgcggccacggttttcgcactatggcttgtagcgcgctggtggagtcaggcctgtggtcaagcgacgcggtagagcgccagatgagccatcaggagcgtaagcgcgtgcgggcggcgtatatccataaggcgcagcatctcgaagaacgtcgggagatgatgcagtggtgggcggattatctggatgcaaaccggttcaggcatgtggtgccgtatggctttaaaaagtcgccgggaggcacactcgaccatatgagcttccaggagcgtaatgaccggcagctagaggagctgaaagccagaatactggccgactcggaatggctgacaacgtctgagttatcggcaaaagcgggctttcgttccgccgatcctgatgctggtccgaaaggctggaaagcggctgggaagatattctcgctgaaggtcgacggggaggatttgtatccggattatgttctggatgagaaagcgcggcctctcaaggttgtcaggttgatactctcgctgttcaaggaacgcaaaacgccgtggggactggctatctggtttggctcggctaatcgcaggttgagaggagggaagccgaaagatttgctgatttcaaagtcagagctggtactgctggcggcgcaggatgaggtggagtcaggggatgctggtatttagtcatccttggagtagggtttttcataacagagggaatcagtgcaaagcgacccagcatttatgtagacctgtggtttagcttagcactccccgtgggtagttaaatttgaccgtccgctaagagtgaggaatggaaatcgaagtgttggtacggatggtggattttggctgcttaaaacattgcagtgctggtgtagacacgacaaacataaaagtggatgcagttagaatagatatctgtgcagtaggtttctttgaggactagaacaatcaaaaagatttagataaaattgcagtgttaaattaattaactagtggtaattaagctttaaatgcgttagttgatttgtgtgactattgaaaattagcgctttttgaatgcttggagagtgaaatgttagaaccaccaaagagttataatgaaatgttacctatgctccataaggcaacttttattactacatttatattttatctgtcattggttatttatggctacatcccattggttggcattaatgccaagtacattccacccattaaagactacgaagagtttattaagtggatattaacattcggcatattaccaatcgcattttcaattttttggaccgtgattagtggagctttagatctacataataacgtggcaaaaatcattgggataagaaaggtatgggataattatttaattattaagccattggcgaagatagccggcgttacgagaaagttaagtggtgatgaatcctacaaggtaatgagtaaactttattatccagaagtaaaggagttgaaagataaacattatgttgagcttttttggaacaaagtatattacttttgggttttctttgaacatacagttattgcatttattactgttttgataatcagtttcgctaaattaactaatctattctctgttactggttctttaaataacctttggtcgtggtttattttccttgttgccttcaattttcttatttttatagcatcggttaagccaagaactgaaagtcaagtaagacagatacctgatgataaaataaaggaattctttaatagtaacaatattatttaaatggggttagttttgaattacaagataaatggaataattatacgttcagaaaatgctgccaaaccatatactatgccatctaattatctctgcaactatattgaaagctctattaaaagtggcagggcccttgattttggatgtgggaagcttaggtattcagaacaattggtaaataaatttgagactgtaacatttttggattccagaaaacaacttgaaagagtgcaaattatcaggggtgtacaaactacaatcccagagtatgtggctaataactataaaaatgctaatgctgttccttttgaaagtatagataaaataacgaaccattatgattttatactttgcgcaaacgtgctttctgcaattccatgtaaatccactatttacaaagttatcagtgcgattagagatttattaaagagtgatggggaggcaatgattgttaatcaatacaaaagctcttattttaagaagtatgagagtggaattaaacatttgcatggatatatataccaaaactctcgcaacgcttcctattatggtttgttggatgaaaatattgtaagtaaaatttgtttagataacaacttggtaataattaagtcatggagaaaagcaggcagttcatatgtggttgttggtaaaaataaacatatttagtatatctcaaaaaattcttttaaggtgacatttacttgttacttattagcttaagggttcgggtcaacatgacccgaacccttaagctattgccggtttacagacatttggccaaagcattgggggagttcagtacgaagcttttcttaatccaactagttatgctcgcttatgttagcaatttcttgtacatagctgcctattccaataggacttctatgagtgaagagcaacaataaatagcctccaaataaacattattcaatgaatcctgccaaccattatctgtaattaagtcactaattataaatcaacaatgtttagtgtcattccaatattatattgacttgaaatctcagatgaattttttgctattttagcttttaatttatcaatgctaatcatatcttcatagctgatataaaccatatcatcttggttaactttagatttgttcactatagcttgaataacagacagatcatccattacacctctcagaaatttaaccatgctttgatctttgaagtcagatatcgattttgaacgttgcttacgttggattgttccctttgtaattacttcattgatttcctttaaaccggtaagcatatcagataggctgccttcgcaactcatccggtgtttaattgcattgcgattaataacattgagaattatttcgagtgagtctttatcattccatgggtgtaatgacgtataatcctgatggcgttgaatagcatcgagcatatcatggatcatatcttcatctgctttatcgcaaagttcattcacgaaatagctgggatcgattattttacaataacttggaactgagttttttgatattttacaaaaaccaaaaatatataaagtagagtatttatctttgaggcttatacctaaatcatttgtcttttcaaaagctgtaatggtttttttaatttttgtcgggcttgcattcgtagtaacttgaactgctaccatgttttgattgtcagctaaatcaatggcgggaaagttaactttaatctgattcatgttctcaagctcacccatttttagtgcgcgaaacataaagatggtcaatgactcaatcattctttccatgtcatgaaagccagcctgtttgcgttgcgcgatataaagctgaagtagcgcgatgtctctctgtaagtttctaataagtgcgtcaatcatagctaataatccttttcaattaagttgggtggcttgtttatttgactgttagtttaatttcttgttgttatattaacacgcttcacaattcaatcaagatttctcaaaaattaatcccctcatgtaaactcactaactatgctgaatgcattccgtagttaaacatgtccacttctggcagagaaaggcctgaaggaaattgataactttgctatgagcaaggaacaacaaatctgtcttaaaaggaaggtcggccaacatacagttgacctgcgtaaagtagtttgttagataggaatggcattcaagcataaaaatattagatcacatagatgcgacgactggtgagacgtttcctgcatccgtccatatgtttataaaactgtttttatcgacatatagccagaacatgtccattctataaacatattttcgccatatgttaaaaatttttttatcaccatattgccggagcatgtcgatagagtttttgggggggcaatcacagttttctgcacagtgctgttaacgatattttttgggggtgatacagatgtacatggatacgacattgaagatatgaacatttaaaaaaatctatcccctatagaggatagatttgaaatatcccctaaagcggatatattcaaaatatctgtcatcggggataaaatgaacgtaacttcacccaaaatgctggctcaggcagtcagggaggcacgcaagcaacgtaagctgactcaacgcgaagctgctgaaagcatgagcatgaagcaatcaacggtttcagagtttgagaaccatccggaggggacacggctggacacgctttttaagctccttgccgctctggatcttgagcttcaggtcgtaagccggaagggtaaaaaaagtcatctgagggttgggaccaggagtggtaatccgtggaaaaattaacggttgcgcttaatggcatcattgctggtacgctggagaaaacggttggcggggaaatgtctttctactaccagagagactggctggaaagagccggttctcgtgccatttcactttcgatgccgttacgggaagagcgctatcgtggcaaaatcgtctataacttttttgataatcttctgccagatagcgagcaaattcgtagccggattaaggtacggttccatgtgcctacgaagcaacctttcgacttattagcacgtattgggatggactgtgttggggctatacagctttggccttatgaaaccaatattccatccgttcagagagtggatgccgaacccttaactgaaaacgaaatagaacatctgctgcagagatacaaagatgccccattgggtatgcaggcagaggtcgatgatttccgtatttcactggcgggcgcgcaggaaaaaacagcactgcagcgcgtattccgtagccatctcgtcagtagttgaaacagtaaaaaatgcccctatttcatggctaattaaccgctaaattctagccatggaggaaactaccgatgccaccccggacacaccgccagctcgtgagcgttgaagtgatgtggcctgctcagacgctaccgcttcccctgcaacatgtagacgaagcattgaatcagggcgaaacgcccgatcagattattatccgcatgaaccaacagggtctgctggcgtggcgcgaagacgcattcgagcaggatacacacgatgtttttcaggtgcggctggacaatcagcatgaggcgcggtttctctgccgctacgttactctgccgctgcactgatacccgtatcccggtactgcgagattgaagagtgctgtttatcaccggataaattaatatgctataaaataaagagttagcatatgtagtttcagggatgatgagttgtaaatgaagaagaaactgccagaccagctttccagggaatgcattattgcggctatgcgcgcctatgatgaaggtgtacgccaccagttcagcgagtcccggctgtatgatgtggtctttgaagggcgcagttatccaccgaaagctatagtcggtattgctgcttcaaatatgataggcgttgagttttcccctgaagattttagcggtggtatcaagtcgaaatgtgtcaagttgcttaccgatcaagggtttcagatcgttgagaaaaatttgggtaacgagcagcccgccatcactatttttcctgatgaactgccaccgcagagcgtatttactgaaggtgccgctatgcaggtaacggttaaccgctatgaacacgaccgtaaggcccggcaggccgcattagcctggcatggttgcctgtgcaaagtatgcggcattgatatgatgagggtgtatggtgagatagcaaaaggttttatccatatacaccacctgattccgctatcagacatcaaagataattactctctggatcccaaaaaagatcttattcccgtctgccctaattgccacgccatgttgcatcggcgtaatccgcctttttcgcctgaagaattgaaatcaattattgaatatcatgcggctctttaggtattacagcccattcgctgtggctcggtggaagagagtattttgatataaattgctattcgcgcagcaacttcagccacggattattcaccggcactttctcccccaacacctgcttcggatcttctatcagaaaccctttcaactgactacttttcttttgtggaacccgaacctcgcaggtccagataaaactgtcatcattacagcgcagggccagccctgactcctggaacattcgttgtgccagcttccagccgtcgccggtgtcgcccgtgatttctgctgcgtacatcttaaagatccccggcgttatcaaaaaaagatgattttccactacatgcaccttaccgttacgggtattcaccgtgcctgaagaactgatgtggttcttcagccacagcaggaagttgttaatgtcaccaagcttgggatcgtctgttatatccggcagcggttgagtgggtgtgctaagttcagggacgagttccgctccgtttaccggcgtcacatcaccgccaaaacaggcggggcgttgttctccctgttcccagattgcagatggtgtcaggcgcagcagcgtcagcggctcaacgggcgaccatcccttatctgaacggatgatgcagcgccagatcgctttatcctcgttagcgacaataagctgatgcgtcagcagttcgtcaaacaagcggttattgttttccggcacactggatacgccatgctggagtagccaggcgcggacccggtcggcggtggttttgctgaccagccacagcgcatcctccgtcagccagccatcggatccgcattcgggattattgagccggtactcgttctgtaccagtgagcgtaaggcggtgagaagctgctgggggaaggaagagggcttttgcgccagcgcggttttgatatcgccgccgaggtatcgggcgacagaggctttatcggcctgctgcaccagttccgccagcgcgccagcccgttcgtagtgtccggtaagctgataaatcagggacgcaaaagccgtggggtatccggccagccagtccagtaatggcgagggtatcaactgattaatcagcattgcggtagccgccggatgcagatgatagtcgcgaccgtggctctggtactgccagcgataaggctgtgccagattaccctgccacgaatgccagcgggtgccatcacgttgatgaatctccatatccacggcgatttttcccgtatcgtgcagcaatgctgcgcagactaccgtgaccgtccatgcgctggcctgccgggcctgttcttccgcacccacttccggtggcagcagataaccctggcgcagccgaatggcgttgcaggcaacttccagcgaatgatccagtagcccgccgggaatggaatggtgatgactttgtgaggcgggtagcagctgtaccagtgctgcgaagcgattaatcgccgtgaggatccagctatcaaacagggtatccggcagcggggttagttgccgtaactggtgcaaacaggactggcgtaacggtgtcgccagtaatcgttctgcggattgtggcgcaaaccagccctccggcagcgtagcgtctggtgcaggtggctggctttgggatggtctttgtagccacttcagcataattcctcttttcgggcaggcccctttgcccttgtcgcccttcctttgcagtgtttccctttgggccttttgttagtagtatatttttgctgtcaacagggaataattaagtattgcttgtatatcaaccgggatatatgtccagatttaattctattcagcgttatttattaagtcatatgagggggcgaggatttagattgccttactaagatgattaattcaatggtaataataaaaaataaattaaatcaaggattgttgatatattataaataattttgtcttttatgaggttagtaattatattaactctaatttcaataatttcttgtggttagctatatctctttattgttttttatcaaaatcaaaataatcattcagattcttgtataattctttttcatctattggtaaaccattttctttatcatgatataggtgttctagatatagttttgcttggttttttcttaatgtgacaccatttctcccactactatctactgggcggaaatgcaggttggcacctaggttgtaaatatctagagactcacctgctgttgttttagcacctgctaagaaactatatccaacacaaaatggatccggttttataattgattcaccatacattaattcacaatcattaagtatgtcatgcatctttgcataatctttccatttcttgttctgaatataatctttccagctttcgaagttattttttatgttttcttttttgaagtataataaaagacacgcggaccgctgatcagttaaataacgagaggtcaattgtagaagtccttcgaatattttctggttattgtatccgattttggcttcaattagccatttgaatctatctttttctacaaaaatatcaacatgtcctctattcgatggttcacttttggtttgaaaaccagctttctcaataaggagtgaaatagtcgtactgatttgctcctccgactggtcataatacttatccgcattactctctatagatttgactgcatttcttaaagttataaaaacactgcgactgaactcatcaaatttttgagggtcaattaaatctaggaaatcatcaagaactcctgagcttagcattgagtcaaatacttcatcctttattatcattaatctatttcccaatctccatcgtcacctataatacttatacttgttgtaaaatagaatgaaagtctttctttgagaacagggcatataaaatgcccatctttttttaaacattcattgcgatggtataaataatgtttaaattcgactttagttagctctaattcttcattatcctctaaaatatacgaatatcgcggttctaatatttttaaagtctccccgcaaaaatatacggcaatatttaaacatttgttattgtcagtttttgttatacttttgattttagatagagggaaatattttatggaggggttgttttctataaaatagattaggcgaagcatctcctcctttagttctaactgcagaacaggatcatcacttattttcaacttcgcctgctctaagtgccccatcactcagtacctttctccactatagaaactaacgaaatggaatgtgacagccccttcggattatcgattataaaccgcttgcatacagtataattaaagtttgccattgactccaggctaatctgtgttttgattttaagtttgacctttggatcaatttcttcccaacggacagtaactgcaacacactcaacatcttctttttcagagcctgctaaatgatattcttgttcacgtaaacatacatcaacttctttacgacatgtacgaggaatagaaataccattatctttgctataaaaaacacaatcaacaactcggcctattgaactattattataaatagtgcttatagatttatttagatttattgagtttgaatctttaaggctaatgccattcttagataatatttcaacgaaagtatcttgtaagcgagccatttcattatctatatcgcgcttaccaatttctgtcgatattttaaattcaattctgttatgctctttaggaatgaatacagtatcaataaattgtttttttatatcttctctgtaagaaacttttcttaagacaccctgaaccttttcaagcttttcaacgcgctcactgactctacgaggggtagaaaagaagaaaattataccactcttcttatattcgatgtgtgtcaaaacagggagtgaggatacagttaaatcttctggacttacaaaaagtgggaagcactcggagtaaggtttaccatcgtatttaattttattagcgttagccactaagactgaatgttcatttgctgtaagtggaaaaatttcacagtaatgtttacctaagaacattaatgctttagtaatactgactaagttactatatgtagcacgttctgaggccttgcgttttcctgaaaattgttcaaggatatttgaacgagtctccttccagcctatgcctgtatcaaagtcaaaccttttaagatagtaacgcgaatagttagtatctgaaatggttccaataacttccagtaattgctcaattggtaaagatgaactggatacacacgactcaacctgagacataatcgactccactttttcttttaattaaattattgaaagatatggaagtcaataaaaagattgtaaattctatattatatttgtggattataataatgtatatttatacagcagcaggctggcgaaggcctggtccagccgacgattttttgcttcagcaggtgcgcgatcaggttcaggcggatgcgcagttgcttcagccagtgggcggcccacggatcgtcggcctcttcggcgcgcagcagacgcctgagtaacgccagacagagcagcatgccagtgggatgcgcctgccacagccgggcggcgatgcgggtgtgcagggtgatgcggatatcgctgaacagggttgtgccaggcatcggaaattctccatggattcagatgcccgcagtgtcggtccgcgcaatgagccaggcgacaggaaacccatctggcccgcagaaagttaatttcgccgatgaatgaggtttgattgatagctggtacaccggctttatgcggtgcgcataaaatcggggctatctgcgcctgcgccgaagctgattgaactcgccccgtctggccttctccagtgttgccataagataggcgagggggcggtggatatcgtgggcggcgatccgccacagacagtcgtccagcacctgctggcagagagcgggctccagattgcgcatggcgcgttcggcggcgcggcgctcgctggcgctgaagggattatccacaggccagtgcagcagttgcgtacgcttttgatgtttattgtttaaatctgtaccagtatgtacgcaatgcggctccggctgcccgccagcccccgccacatcactgagtcttaattgaagactcgggcattttttactgagtcctcgattaagaccaggggcggtcttcaatggagactcagtgcaggttcgtccactgtccacaggttgttgcagggtgagcagtaacccgatggcgatgttgcggatacgccggttgcggtgatgggagcaggccgtgagcagcgccagatattcgctgtccatcctacaggcatcggcatgggataaaggcgcatcatgcagggcgtagaggttaccggtgatcctgccgcttggctcgtcgcgcagccgctggcacaggctcagccagcgagtgatccgcagcatcatcagcgcgttgctgacggtactacgtgaggccttctcgccctcaggctggtcggagagccagccctggagttcgttgtatgacgggaagacgccgctgccgtcgtcgcgcgcgtgcaggcgcagcagttgccacgtgaacttgtcgcgcggggagaggttgcgcgccagcagcaggcgcttcggcacgctctgctgcgggttgccgagaaacagcagcctatcgtcactcttcatacagcagcttctcctgagtccactggcgcagcaggttccagatgaccgtcagcgacagatcgtgttcgcgggccatcgccatcatggcggtcagcgcttcgggtgagtcgagctttttcacgcccgttttctgccactcgttccacaccagcgtttccacctgctcatcgggagcattgttgcgcccttgccggacaaacaagccaatcagccgccgccgggcgcagacctccggcgtggaaaggccaaaatagtggttgatgaattcgatggacgcgcccagcgacagggcttcctccagacgctgctggaacagccgctcctgctccatcctcgccagcatccggcccagcatctcgtggtcaatgtggggggtgatgaactgcaccgcactgttgctgagaaacaggatgtcgtcggcggtaaggcgcgtcagctcgcacagctcctgcgggctgaagcccagcgattcgcagtagcggatctgtccatccttcagcgcctggacgatgtgggtgagcactgcctggttaactgagggcgtcatggcgaacctcccgcagccgccgctggcggcacaggctgataagctgcatcagttgctggatctgagcgttgtcgtagtccggcgacaacagcaattcgagggcgggcatcggcgtgctggtgtcgccattcagggcggccagcacctgatagcagcgccgtgccgccggatggggaaaatcgtggcaaggcgcgagggtgaaaccggccggagcgctgtcgtccggctggatacaggcatccagtccccagcaggcaaacagcgactgtgccgtatgcaccagcggtgagggctttggctcatcgggcgcggcgggttcagtcggtggctcaggctctggtagtggtgctttttccacttccggcggtggcggccagaggaccttttcgaccggaggccccagcagaacctgccgcttgctctgaccatcggtcagttccgccagcaatgtattccagcttatgccgctgcgacagctcatctcgccgagcagttcgtcctgcaccagttgcggtaccacagcttccggctcgccgttgaaggtggcgagggcggtgctgaacaggtcggcaaattccggctggcgttccagcggcatcagctttacccagacctgttccgccgcgctgcgtagtgccagcaggcgatcgataacctttcgggtaaggccgccgtatagcgcgttagggatgcagggcaacagccagtccacggtctgtagcatccggctgatttgcgactggctgacgggataaccgtcgcgggtcagttgctccgccagcgccagctgcgtcgggcattcaatacctgcctcgaggtaaagatcgcgcagatgcagaataccttccgcccgttcgataaacatcaatccgttatgcaggtcgctttccgccagatggccgatcaggcactggacttcgccttgctgcggtgacagcgtttccggccatggtctgaacggccagcagacgcggtggtaacgctcatcctgtgtctcctgccacagttcattgaggatggcgaggtgcgtattcctgccgctggcgagcatgtatttttcatcaccggggcgacgggtcaacaccggcgggttatccagcccacgggcgagaattgacgctttcagcgcatcatagccggggttgcgggtgacgcggggattgagagagaacggctggatttgctccaggctgacctggaccatttcctgttctccggtattgctggcaccgtgaagccagcggttgagcaggtgtgaagcacacataatcttcctccggcattcagacatcgcgggtaagtcggatgcgctggtggatccaggcatccacctcgctttccagccaggcgacgtggcggctgttgagtcggatggatggcggaaactgttgcagctggatttgccggtaaatccacgatttaccgaagccgattttgtcttccacctggcgtaagcgtaaaaatctgtcgctattcataaccattcctcctgtgtccagattcgttcacatcagcacgatgggcgtggttatcaaagcagcagcgtccctgccaggcagtaaaaatccttatctgggttagtgagagttgttagttgaaagggggagttgatcgcgttacggcggtgcgccgcgctggagtgcggttttcaacgtctcggggctcagcggcaggtgcataccttcctcacgcgcccagcattcgaaaatgttcagcagtttgtagggatgctccagcatttcgtcgtccagttgcgggttgtgcttgcaggccagccacagcaaacgggaaagcgcggaggtgatccgctcctttgattccggctgatggcgggtcaggaaggccttgagatgagtgcggcggatgacgaacagtgcgtcaggaggcaatgtatcctgcaggtagcagacggacagactgagccgggacttaaggtcattgcgaccattaccatataactggccaatcagcagatgtagttcttcctgaaggttgttttgcgtggcgagcagttccagtaaaagctcccgcaacgatttgcggcaacagagttggtagtaactgtcgttctcatcgcagaccacaatgccaatttgattgcagcaatgggtatctttgggacaagggcgattcaacgttttcgccagttgctggtggagcagcagacgctcaaggccgattaacggcaaattccacagatggctggtggtcagttgcagagtcgggtcgcgtctgcatggcggagagttcgccattatcttgcggttgccgggtttgttgcactgcgaaggcggaaagggaggcttgctgaatcggcaggcaaagcggcaaggaggattgagtggtctcagcagaacgggcgaagggaagtagaccgagagcgacagatcgccgtgcagggcatggcggatcaggtcggcgggcagcaacgtgatgttgtgctgccggatgacttctgcggcctcgtccagcgtcagccactcctggcggattttatgtggggacatggggcgtttctttttgtgttgttggttgcgtgtcgtgcttgttgatggcgaaaaccggtgtgcgatgtttttgctaaaacaactaacctgatcagtttagttaacgatcttttcagacataatctggtgatgaattacgctggaaaaacaggacgtaaaattgaatagctcggaagacgatttgcttgaagtggcgtggtatttgtcgaagtacggtaaatctcaaccacctgtgggattgggtgttctgaaatggaaagaggcttatgatttgttttatccccgtttcggggcgggcaaaaccgctagtgagtttcgcaatagtctgaaaaatagtcgtgaccgttttgattcctggcttagtgatgtgcgtgtcggctggcttgacgagcagggcgctcctgctgcgctttctcattcagcgcagcgtgtgcatcagcgattgagtgtgctttcagagagtgcaattgagcagcgcgttctctcgttaatatcttctgctggagatgaacaggcacaacgagactgtcttattattcagcaggataaaagtattgaagatactgtacgcgagcaacttattgcggcgcggctggggcagggtacctttcggaaaaattgtctcatgctgtatccggcatgccctgttacgggaacgacttttgcgccgttactgcgtgccagccatataaagccgtgggctgcctgcgagaatgggagtgaacgccttgatccttttaatggaattatactggccgcacatattgatattttattcgatcaggggtggatttcgtttgaaaacgatggacgtttattaattagtaatgagctggatattagttttaaagagcagtgtctgttgccggagaaaataaaggcgtttcctgttgaatcgtattgttatctggaatggcatcgggataatttgcttcgatgaaagtgaatgggacaaataaattactactcaatctaaaatatattttgagagtatctgaaattgagtaatgttcttttagcgatcctctgggggaagtttacgtcaacgctcactttgacgaactagtttgcgtggttcgacgttgaggtgcttgttaaaaaatcggtggtttaatctgtcgagtcgggtctaaccttctcaagaggagctgcgactctccttgtaggctgtttttatgaatgcacaagcgtttacctaacttacggttcatgagatcatacctgccacagtgaaaccatggggctctttgctagaatttgttggattattgttaaactttttgagctaggctttaccgacaaaagaggaatagttagcttctttttcatttaaaatattgtattttatggtttttattgatgtttattcattgggccccctgaagaacgagatgattgtcagatgaaaaaagtatcttgtgttgatttattttgtggtgcaggtgggttaacacatggtcttgtgcttgaaggagtacctgttgtcgcaggtattgatattgatcctgcctgcaagtttccctatgagactaataataaagcaaaatttattgagaaaagcgtaagcgattttacatcttcagacttgaatgagctctacgctgattcagatgtaaggattcttgctggctgcgcaccttgccaaccgttctcaagctatgcaaggcgttatgagcatggtggtaaggatggtaagtgggggctgttgtacgagttttctcgcttggctgaggaaacgcgccctgatctgatcactatggagaatgtaccttccgttgcaagacatgaagttttcagcgactttgtcgataccttaaaacgtattggctatcacgtttggtttaatgtcgttgattgcactcactatgacgtcccccagatgcgtaagcgcatggtactgcttgcttctttacacggtgagataaaactcgccgagtcaacgtgtactcagccaattacagttagacaagccataagcgatctgccagctttaaaagcaggcgaaactagttctggggataagctacatgtgacttcaacgttgtcggaaaaaaatctgcaacgtattaaagcttcaaaacccggtggaacgtggcgtgattggcctgaacatttagttgctgattgccatcgtacagataaaggaaaaacatactctagtgtctatggtcgaatggaatgggataaacctgctccgactatgactactcagtgttatggtttcgggaatggccgctttggtcacccagagcaagatcgtgcaatctcattgagagaagctgctattcttcagagttttccgcaggactacgtatttatccccgatgatagcaatgtcaatcttagagttctgggccgaatgattggaaatgcagttccggtaaagctgggtcaggcaatcgctcgcagtataaattcacaccttgacgatttgaacttggtcgcaacaaagtgaaactttaaccagcctctgggcgtactgaaccggaatctgaacattttatggatatttcgaatcaaaaaaatcatcctcaacaaattattccagagccagggcaacttgttgaagttcgtcgacgccaatggatcgttgttgaggtttcatcttcccagttaccaccgccttcgtctcagcagcatctcataactctttcatccatagatgaagatggtttaggagaactacttgaagttatctgggaaattgaacctggcgctcaagtaattgaacgagctggtttaccttcgattactggcctggatgactctgacactcttgaggcttttcttgatgcagtgcgttggggagctgtcactaaagctgaccatcgtaacttcttacaagcaccttttcgtagtggcgtaagcattgaagacttccagcttgatccgttggtgcgtgcaattgatatggctcgtgtcaacctgcttatcgccgatgatgttggacttggtaagaccattgaagctgggctaatcatccaggaaatgttacttcggcatcgagctcgcacagttttgattgtttgccctgcgtcgctgcaagagaagtggcgtgttgagatgttagaaaaattcggtcttgaatttcaaatcgtcgacaccgcttatattaagcgattaagacgagaacgtggcattcatgccaatccatggacatcgcatccacggttaatcacttcaatggattgggccaaaagtggggaaggtttgcgttccatgcgtgacgtcctccccttaaagcctagttatccaagaaagtttgacatgctcgtcattgatgaggcgcacaatatagctccagtgggtagagctaactatgcaatggaaagccagcgtactaggtttattcgttcgataagcccacacttccaacaccgtttgtttttgacagcgactccgcataatggctataccgagtctttcacttcgttgcttgagttgctggatgatcaacgttttgccagaaatgtacttccagatgagaagttgttgaatcaggtgatgatacgtcgcctcaaaagtgatctggtcgattcagagggcaatccactttacgctcaacgtaagctcaaagccttatccgtcgaatattcggttcaagagcgttctatccacaaaaaattggatgaatattgccatagccgggagcaaggagcagagaaagccagcaatacttttgggacgacctttgtcaaccagctccttaaaaaaagacttttttcatcaccagcagcctttgcatctactcttgaaaggcacatatcaactttgacgcatggcaaacggcctaatgataaaaatgccatggctgatcgtatccttcataaagcaatccttcgtctagaagaagattacgctgacgatgaagagatagagaatgcccaatctgaagcggtggaagaagcaacacattacacccaaccgctgacgaatgaacagaaacaaatacttgatgtattgcgtcaatgggcgcaagtagctaagaatcaggtagactctaaagctagggcaatacttgattggattaatacgaatcttaaaacaaataatcagtggaatgagtaccgggtaattctgtttactgaatatcgaacgacacatcaatggatgcatgagattctggccagccacggacttgctggtgagcgcttagctgttttacatggcagcatgccgcaagaagaacgagaaaaagttaaagccgctttccagacatcaccaaaggcttctgctgttcgcatactcctcgcaactgatgccgcctcagaaggtatcgacttgcaaaactattgtaactaccttatccatttagaaattccatataaccccaatgtaatggaacaacgtaatggtcgtatagaccgccacggacaacgccaaaaagaagttgtaatttggcacccggttgatggtgtggataaggtgaatactcgtatcggcggtcacggtgacgatatcctacgagcattacgcaaacttgaatcaatgcgggctgacatgggtagtgtcaatccagtcatcgcacctcaaatgtcaggactgattgaaggcactatcaaagattttgatacacgtctggctgaagccagaattgcaaagacgaaacgttttattagtgttgagcgcgaactaaaagagagaattgcgaagctacatgatcgactcctttcagccagacaggagcttcatctcacacctgagcatatacaaatagccgtcaatacagctctcatgttagctggtcgtacaactcttgaaccttttgaattacacgatgctccctcaggttctgtattcaggatacctgctctctcaggtacatgggcacgttgtcttgaagggcttcgtcatccccatacacaggagattcgtcctgtcacttttgatcacagtgtggcgaaaggacgtgatgatgtcgtactcgtccatttaaatcacctgttagtgcagatgtgtctacgtctattacgagcagaaatatgggcgcgcgatgatataaaaaaattacatcgagttacggtgcgctcagtaccagacatgttacttgaaagccctgcggtcgctgttgtttcacgattggtgattactgggggtaatcaccatcgacttcatgaagaattgacaatagctggtggctatcttggcgacaaaagctttaggcgcgaggatggtgttaacaaactacagcaatggtttgagcaggcgaaacctctgactactgaattttcgcttttggatgcctttcgcatgcgttttgaacgtgcaaaaaacagtattcttcagtctgttgaagctagatcaaaagatcgcctgcaatatctgactaatacccttcagacccgtaaagagcgtgaattgtctgatatcaataacatactcaatgaacttgaaattactatcaaaactgagttagctaaagatcaacaacctatgcagttttcattgttttcagaagatgaacgcgctcaagtcaagcgtgataatgcagcgctggaagcccgcctcgctcgcattcccgctgagcgtgaacaggaagtacaaacaattgaacttcgctataccaacattgatgatcgcacattccctgtcgccgtcatttttctcgtcccagaatctactattcaaggaggcgcagcatgagtttaactaacaatcacgctgaatggctttctctggtagatatttcgggaccttttctcgctatcccggtactaacgcatacatttcctcagggactagaggagcttagtagcttcaagcgtagacggctgcgtcaagcctatgacgaatggcgggaggcattagaactggaagatcctcagctagaagatttgcactctgcatggatagacgaagtgctgtcacgagtgttggaatttgatgatgatggtaaaggtgatgtgctgaaacgtgaagagtggtgtagaagccacttgaaatcagtattgccagatcagggagtggttgaatatcccgatttggcagttgttgatgaacagcaagataacaagccattgttactcatacatacctataaaccaaatgtagaactagaatcaacagtaaaacatgagggatggataaccaccccggcagatcgtatggttcagttatgtcgttcacttggttgccgtctcggattgctaaccaacggcgaatgctggatgttagtagatgcaccagtgggtgctgtcacttctttctccagttggtatgcgcgtctttggagtttggaaccaatcacactgcaagcgtttgttcatttacttggcattcgccgcttcttcgttgatgaaactgaacagttacctgcattgtttgatgcttcattggagtatcaagatgatgtaactgatgctttaggtgaacaagtttgccgtgctgtagaagtgttaattcaatcgctggacaaagccgatcaggatcgcaatcgtgaattgctgtgcgatgtcagtgaatcagagctttatgaagccgcgttaacagtgatgatgcgtttggtatttttgctctcagctgaagaaagggggctgctgctcttaggtgacgaatgttatgagtctaattacgcgatttccactttgcgtatgcaactacggcaagaaccttcagaaatcctggaaaggcgttgggatgcctggacacgattgctggcaacctttcgtgcggtttattgcggtattgagcatgagaatcttcgtttacctgcattaggaagttcattgtttgatcccgaccatttcccttttctcgaaggaagggctaaagaatccaactggaaaaacgatacagctgtacctttaccaattgataatcgaacagtcctcctattactggaagctattcaggtttttcaggggagaactctttcttaccgcgcattagatgttgagcagattggttatgtttatgaaggtttgctggaacgcactgtcagacgtgcagatgaagttacgttagagctgaatgcgaccagaaaagctcaatctccttggattaccttagctgaactggattcagtctgtatggatggtactgaacagctgatcaagttactacatgaacgctctggtagttcgaccagtaaggtacgcaatgatctttctaaaacaattgatgaagatctgattgaacgcctcttgattacctgtcagggtgatatcaagttgcgtgatcgaatcaaaccttatgtccatttgcttcgtacagatccttggggttatccattagtttatccagccggtgcatttatggttattggcagttccaataggcgcgaaacaggtactcattacactcccaagtcgctaactgaagctatcgtggcggagacattgacacccttaacctacttcggccctgtggaaggttctgcatgtaaagaatggactctcaaaactcctgcggaactacttgatctcaagatctgtgatccagctatggggtctggagcctttttagtacaggcttgtcgttggttagccgatcgtctcgtcgaggcttgggctcaagccgaaataaagggaaagattataaatgtagatggaaacgttcttgacgatttgagttccaacgagttaatgccacatgatattgatgcaaggataaatattgcccggtatctgatagcggagcgatgtttatatggcattgatttgaacccacttgcggtcgaactagccaaactctcaatctggttagtgactctcgccaaaggtcgcccatttggtttcctcgatcatagtctacgttgtggagatagtttacttggaattcatcaagtaaatcagctgatagaattatctgttttaactaacagtgatgaccaagatacattatttagcaaagatatccgtaaagctatttacgacgcgagtaaattgcgtcagcgattacgtgagatgcctataggtgacatccacgatatagaggaaatggagcgcttgaatacggaggcgcataagcggctttataaagcaaaaaaaattgctgatgcgcttgtcggtgagatttttgccacaggagctaatttttcagcgcgagaagcaaggctcaagatgttgtccttgaagttaaaagagtccgttgaagaagatgaaaatatctttatggaaatctcttatcaaggaactgtaaaattacaacaagaacttccatcaggcagaagtaaacggataccaattcattggcctttagagtttcctgaagtatttatacgaacttgttcagggtttgatgcgataataggaaacccaccattcttgggagggcggaaaattactggcgtattcggtaatctatatagagaatatctggttgctaatattgcaaagggggaacgcggttcttccgctgatctagttgcatacttctttttgcgttcattctatttacttcgagagtcagggtgcctaggcttaattgcagtaaattctattgctgaaggtgattctcgtcaaattggtttggaacgacttcttcaatctggcgcccaaatattttctgcaaccccaaacgaaccttggcctggaaaagcagctgtagttaccagtagaattcatcttattaaaggtgcattttttggagaaaaactacttaatgggaaaaaagtcgctataatttctgcatttttatcagatcaaaatgaatggagccctaagatcttgaaggaaaatttaggtcaatcatttcaaggaacgattgttttggggatgggatttatacttgatgaaaccaatgccatgcaaatgctggactctgataagtctaattcagaagttatttttccatatatcaatggagatgatctaaattccaatccaacacacaagccaagtaggtgggtaatcaatttttgggattggccagaagagagggctaaaaattttaaatttccttatgcatgggttgagaataaggttaagccggagcgacagcgcctcaaacttgatggaacctatgcattgagaaaaccattacctatacgttggtggcaatatgccgataaacgtcctgcactttaccatgctataggtaaaggtgatttttttgaacgtcatccaaaaaattggtccactgaatcaagggtgttagagaacattatcgctatatcaagacatacaaagttctttaacccggttttgattcctaatacagctattttatctgatgcaactgtagttcttgcctttgacagttttgcttatttggcttggcttaattcttccttggtacaggtctgggttcagaaattagcttcatttataggtctcactattcgcttcactcctagcgattgtttcgatacattgccaaagccgaataacatcaacaatgtagagcttattacactcggtaaagaataccatcagtatagaaaaaaattaatggttaatcgcgacattgggcttactcagttgtataatttatttcatgatcctaatgaacgagattcagaactaaatattctacgtgagaaacaactggaaattgatgttgctattctcaatatctatgggtgggatgatataaatctgagtcatgacttctataatgtagcttacctacctgaaaatgataacaagcgtttcactatctccgagcctgcacgtatcgaggtattgcgacgtttagccgaactgaatcgggagcgatatcaggatgaagtcaatcaagatttacatgcccgtaaatctactagatcatgattaaatgcgccgtgattgggaagtgttaaatttttatacatttatgaaacgatgccaacaaaaatccagtgtgctttgaggaaaaatgatgactaatagcccctattccaattcaagcaacgcatggtttgctattgatcgtgacggagataaggattcccacttagccctctatacattgcaactaaaaggtgatcgtgcactcagccaagctgttgtcaacaatgattgggtagtagtcttggatactaaaggccatatcacgcgagttggccgcattctgcgcattcgctctgatctcgaaactactacgctctatttcgatcgtatgtttcgggttgtatcgcctgtttccattggttcgacctcacttacactacctgcaaaaggaagttatggccggcttcagtggaaagaattcattgaaatgctaccaaattcactaaatacaagcattgctgaaataccaacgatcgaagatcaaacttacattcgcgaattactgcaactagcagttatggatgatttactcgggccggcagccggccctaatgagcttatcgtcgatatgggcgtaagggatcgctatcttgttggtaagcttgctccacgtgaagccgccgagcgcagttctgagttttctgtggatccagagaatgctgatgatgatgttggtgaccaaatagttaagtctcagacaacaaaagtgcattctccaaaagtgtctggccggggagaacctgatgtcccggaagaaattgatgctgccagcaaccaatcattggtaccaagtagtctgggaatgactttttgtgtcgatggcgatattgatcaaatagaactagaagctcgttggggacgttatgagcgtagcaatgaccatgagatttaccgaatccgcaagaacaaggaaacaggagtcgaagaacagaccaaagtaaaagtctggcagcgtttccctagtggcgggaagattacattatctctgatagaaggcacgattcctcctcaagttgtagatagtacatgcccagaagttttggtacagggcacaattcgtcacaagaatgaaaatggggatcgcctggtcaccatattccttgtaaacaatcaggacgatccaccttctaatcatgatatggcatggattttccaaccagaattgatcgttagaccagtaaaggatgctgttgagaaggcgatattcaggcgaaaacccgttttgggttctgacggtatggatcccgaacgtgaagcgctggaaatgatttatcgtaaccatgttgaatttgcagtagggcatggtgttgcagtgcatgctaaacctgcagataacactgaacttgcgactgaaattcgtacgactgttatgccacagtatgaagtccagagaacagaaactcccggtcttgatccatcggatcgtccggcgatgcaagaaatggtcaaaagtggtttacttgacatgcagaaactggccactttggaggtggaaccactgatcgatgcattaaatgtactaaccaaggactatctggattggattagtgaacaacgtgccagtgcaggtattaaaattataggttttgaaacccaatctcagatagcaatggatcgttgtaaggagatccattctcgcctgcaaaagggtattgatacacttaagcttaatgaaaaagcgctggcagcatttcgtttcgccaacaaagcaatggcaacgcagcgagtacgaagtttatacgcgttggctaaacgccgtggtgaagatacgactatcgaatcatttgatattgaaaagaatcgtagctggcgtccttttcagttggcattcttgttgctctctataccttcgttggcaaacccaaaccattccgatcgcgtgcagcctgtaaatgcatatgctgatcttttatggttccccacgggtggtggtaaaactgaagcttatttaggcgttgcggcttttacaatggccatacgccgcatgcagggtaatttgggggggtatgatagttcgcgcggcttggcggtaataatgcgatacacattgcgcctgctaacattacaacaattccagcgtgcgacagccttaatttgtgctatggaagttttgcggcgagaagcactcaataatggcgacatgtctctcggattagaaccatttactattggtctttgggttggcaacaaagtaacgccaggttcgactgaagagagtcatcgagctattgaagatgcccgtaatccgggaaaaaaccatgcgggaacggcctcacctgcacaattaactagttgtccatggtgtggttcatcaattatccccggacaggatgttgaagttaaaaaggataaattggggggaaggacgtttgttttttgcggtgataaaaaggggcgttgtgacttttccaaaggaaaatcaagtaaacaagcccatccaggattgcctgtattagtagtggatgaagagatctatcatcgccctcccacaatgatgattgctactgtagataagtttgccatgatggcatggcgtggccaggtgagaacgcttttcggccgtgtaggattggaatgtgaacgacatggtttgctctggcagggggctagctgcacaggaaatcatcccgcagccaaaggacaaccttcaactaaagttaaggttatcaatccaatacgaccaccggaccttatcattcaggatgaattccacttaattagtggtcctttgggcactatggttggattgtatgagactgctgttgatgaattatgtagttggaatcttgacgggaagtcggtcagaccaaagatcattgcttcaactgcaacagtccgtaaagctaaggaacaggtaaataatgtttttatgcgccaagtggcagtatttccaccacatgggatagacgttgaggataactttttctcagtacaacgacctataaaagaaaagtatggacgtcgttatcttggggtatgctcgcctggcagttcaaggcccgcaatgctgatccgtgtttacactgcattcctgaccgcagcacaggaattattcaaccactttggcgagcctgctgacccttatatgacaatggttggctatttcaactcgctacgcgaattaggcgggatgaagcgacttgcagaggatgacgtacaaacacgttcttaccgggtgcgaatgagcatggtggaaagaccggcattggcacaacgtagtataagtaatattcgtgaattaacttcccgagtatccagtcaggatatccctaaatatcttgataatttagaggttaagtttaaatctgaatttgatactactactggtaagtatgtgactaaatggcaggagggggatactcgggctatagatatcgtccttgctactaatatgttgtctgtcggcgtcgatgttaaccgacttggtcttatggcagtaaatggtcagcctaaaggaacggccgaatatatccaggctaccagtcgtgtagggcgttcatttcctggtttagtttgtaccgtactaacttgggctcgtccaagagacctttctcattacgaaacattcgaacattaccatgccaccttctacaagcatgtagaggcccaatctgttactcctttttctcctcgagcgatggaccgtggtttaacaggtgcgttattaagtcttgttcgtctggaaaacgacgaattcagtcctaacgatggggctggtaagttgaatatgtctaatcaagccgagatcagtaatgcgattaaagcactggcgaatcgcgctggcaatgttgcagaagataattctcgcaaaaaattggcagagaatgaactgaaagaacgtgccgacgaatgggcaaaaaaagcgtcaatgggcggacggattcttgcatatgaaaagcgcgggcctgaaaaagataagactgtcagcttattagactctccaggcctgaagccttgggacaactggacagtgcctatgtcaatgcgagaagttgaaccaggtgtgagacttataatgaacaccaaccatatagcggacgatcacgattggaagcctcgtcccgcaactaaggatgaggactgattatgaacattaatgagaaaacacccgttggtgaagttcgcccgagccaattgctttggacatatggtcctggagccctcattgatttgcccaacttgtcagttgtaacacttgggatcgacaggtgggaaaagaaccgttgtcagccaattcaggaaacccggttactagctgccgttagaaaggtattaggtgaccaggttgaaagcttgcgaatgccaccatttcaaaaaagcgaagtcacagatatgtggtctgctgaagcaaatataggggtacctgtacgtcctttccctagatggttgcgatgcgttaaatgtgggttactttcaccttacgatgccgggcttttcgaaataaaagaaaatcgatttaggcctgaacgaactcgctttgttcataaagactgccggggttctaagggcgatcaacctgcaagggatgctgatgcagttccagcccgttttctcttggcttgccgtgatggtcatcttgatgattttccgtggcactattttgttcatggcggtaacaatccatgcaaaggaacgctgcgattttttgaaagtggcgcttcattgcagacagaaaatctttgggtaaaatgcgattcctgtgaattatcaagaagtatggcgcatgcatttggtaaggccggtaaagaaaatcttcccgcatgtagaggacgtcatcctcatctggattactttgatgctgaatgtgacgaagaacctcgtgcagtactgcttggggctacgaatagctggtttcctgtaacgctatcagcactagcgatcccattatcaaatgttactccattacatcagataatcattgattactgggatgatttttctgatgtagaagatctttctgaacttaaagggatactaaaaatcctcaacaaacgtggtgaagctcaaggtattgaaaagcatgctgcagaggaaatatggtctgcaattgaaactcatcgctcacaagatggcgaggattttgtcggggaggctgatattaaagatcctgaatggaatgtattaatagaacctaatccccccactgattatcctcattttatgagtaaaaaaacccgtactcctacgcggtttgcgccatatattgagcgagttttactcttagaacgattacgtgaggttaatgctttacttggttttacccgggtcgaggctcctgaagaatctgaagatctcaacgaaagaccgcaaatggccagcctgtcacggagcaaacctgattgggtacccgccaatcaggtccatggtgaagggatattcctgcagttcaatgaacaagcgcttgtggcatgggaatctctggacgctgtaaaacaatcggacaaaatgcttcgcggtgggcatacaggttggagaaatgctcgtcacttggatccagaagaaggttatcctggtattcgctatgctatgttgcatacactttcacatttactgattcgagaattggctctggaatgtggatataatgccgcgagtattcgggagcgtatctatgcaaatacaaccaatggtattcctcaggcgggtatccttatttataccgctgcagctgactcagacggtactttagggggactggttgatcttggcaaaccagaaaatcttggtcgtttacttgaacaagcactaaatcgctcaaggatctgctcatcagaccctttatgttcagagcatgatccagagaaggatcgttctctgcatggagctgcttgccatgcttgtagcttagttgcagaaacctcttgcgagaaagggaatcgttatttagatagagccctgcttgtaccaacactggaacatgctgaagcagctttctttaaggatttattaaatggatgatcttctggatgctattacagcgctgagctctctaatttcatctgaaaaaataagagctatcgctgaaaacatcagccatattgatgataataagtctataaccacattgtataatgtggtcaatactccggtagcagcgacagtagtcaaacaactcattatggcttggcaaaagacctctgtcagttctagtgagttggctgcaatgctccttactgccagccatgtctattcaaaagccacttcagagcaatctatcgagttagtgtggacgggccccacaacaccatttgtttcagcacgtcgtactgaacaggctttgcttcaagttattagtaccgctgagcgcactctgtttataaccagcttcgtcgcttatgatgtttcaacgatagtgaaagccttaaatgctgcaaatgaacgcggggttatgatctcaattttacttgaattatcgcaaaagaaaggtggtagtttaaattttgatatcattgagaagatgagaatgcaggtcccttcagccaggctttatgtatggcataataaagctaatgaatattatggcggatgtgttcatgcaaaagttgcagttgctgatgttaatgagtgctttatcactagtgcaaatcttactgggcatgctatggaaaaaaatattgaagctggggtgcttatttctggtgggagtattccaaagcaacttaatgagcatcttttttcccttattcaaaccaaagttatctgcttggtttgataattctgcctcaatggattaggtaacttattaagagagtgaggttcacatagtcggtttcaaataatgacgttccagagatggtagggcagggtgtgaaccttcttggccatcacagattgagccctcaattactaccgcttatattttgacgcttcggtggctaatgaaaataatagggctttcttgacccggatggccacaagctggagctacatgtgggagatttagcatctcgaatggtgcaatgccgtgagaagccttactctggaatgcgtttcggtcctggaaaataatcacgcaactttgtgatcttccacccagtattcaattttatgtcccattctgggggcaaattcccaaaataaattataacaacccattaattttcaatgaattaaacgcaaagtcgagtccggcgtagccatcagaacagaacggcatggatggacttcaaaacacgacttacctagcggaaggctgtacttatttgtatattctccttattatggaacttattagcaataaagaatgaaggaaacacaaattaagtttcttaccgggaatattaaatctatcatgaatggtttaataaaatatgttcctaatatgactaggtaaatagaaaagttaaaatgtgaaagagagcagggggatcttcgatggtaagctatgcagtataaatggtgcaaagaaaagtggaaaataagcaatgcgaagcctatcataaaactaaaaatggatttcttgtaattctgaagcaatgggccgattgaaagcgtatagatcattttttaaagatgttgagctggaagttagttaataaggtttccaaaatctagaaaatatattggagggcatagcgttggctaggaagttcttatctaaagctacaatgaaaggaagtttaatgaattggatatctctagaggaaattcttgactctgatgaagaatacaaacaataagaacgccagaacggcgtcctttaaagaaatgataggatttatctatttggttttataaatgaacttatcaatggtataattaaccatcctgttagttgcttcaggtagtcaacaattgtaccatccgataataaataatggagagcaaatagaatgggtattaaaaatatatttttgcaagttaaaaatttattcaaatttaaaacttttattctgccacgcattgcgattagcgaacgcttacgcgtcttggtgctttgcactcgcgatctcgcaatgcgtggcagagcttagcataatttttcaaataagtcaacgtgttagtaataatatcctaataaattcttgcttctttatccataaatattttcatatcgccctctaaataatgtcctacctgtgcattcctcatatggcattgatttaagttgaaaattatctgaaccaatactgtttttgtgaaaaaaaacttttcaacgaaatatgatggccttgatagactaccttttgctgacgtaaacacccttgaaatccccatggcataagggatataatgatttcacatggtctgttgtgtgtcacttaaggttaaggagtgcgtatgtctgttatagcactggtccgtcagcggattaaccgcatgagacgaggtataccgttttctatcagtgggttctacccgctgggaagtcgcgcatctgtacagcaggctatgagtcgtctggcaaaagaaggcatgattgttcgcgtagatcgaggattttacgcgcgaccgaaaccactcaagaatattccttccatcaagatcgtaaccagtgctgaaaaggtagtagctgcatgggctaaagagcgtggctataaaattaccatccaggggctggaggctgcttatcggctgggtatgcagacgcaagctccggttaagcgtatttactggtcgaatggtccaaccagagagtttaaggttggcaacgagactgtgattgttcagcacaagtcagaaagtaaactgaagtggctgaatcggcctgaaggggagttgttacgtgggttgctgagcctgagtggaaagtatgcccgtctggaagcaatcaaaaatgcttttaaccgtcttaatatctcttcccgggaagctcgctcagccattgctaagaaattagtgagtgaaccagctcttcagggatggcgtactcagcttgaactctttcggcaggctatctgatgagcaacatctttgaactctataaaactgaagaagggcggggccaacttcaggaaatattcacttatgctgcacagaagcacccattgagtctgggggcgagctttctggaaaaggatctctgggttacagagatcctacgtcttctgtttgatgaaggttttcttcatccatacacagtcgcttttaaaggtggaacctcattaagcaagtgctggaatgtgattgagcgcttttctgaagatatcgatttatcgattcattgggcggaacttgctggtcattcagaagaacaggaacaagaggcctggaaagcaagtactcgtagtagaagtcagaatcaacgctttcgtgaacaacagcaaacaagactcgaagaatggaccgcggagttagtggaaaaacttaatcagcgtttccagtcttatggtatttccggcctggaggctcgtttagaggcggaaagtaggggagaaaaggtcgatatattctttcctcgtgttcacgctgatgctgcggcttaccagcgagatcatatcttattggagttcggtggtcgtaatcggggaaaaccgacggatacaataacggtaagcagttatttatccggaataaaagagctgggtgagctggagttgccatctgcaacagtccaggcatataacccaggttatattctttgggaaaaaattaccgcactgcatcagttttgtacccaagaaaaagagctaaatgcagaacgtctatcccgccactggtacgatgttgattgcctgttacagcatcagtttgccgatctttatgatacaaaagaagcaatgcataacgtgattgaaatgaagcagcagcgctggacctttcctggtgtggattatacgttggttgctaaaggtgagctacgtctggtccctgaagatgctgggcgccttgctgctatcgctgaagatcatcgaattgctattgagggtggaatgttttttaaggagcctgacgggtttgataaaatcattgaacgtcttcagcaggttcaggatgaatttaatcgtgctatgaaaaaggtaatgggacctgatacgtttaattgctaattctgtgatgttcttccaagtaatgatattaagtgcccattttggggcaaatccccaaaataaaatctcacaacccattaattttcaatgaattaaacgaaaaggcgagtccggccttcgatctagatgagcggttttaagaaacatggcaaggcataatcatcattatattaataatgagttaaacctgtctcatttcgctataccaaactatcatcgttcaaggcgaatcaagagaggcgcagtaaaagcattgaatgtttttgttatgcctccttcatccttattgatgctatccaatcggctgataagctggttgcaaatacaaccagcatttgatgcggcggatatcagctcaccatatcaataagcgcggacaacaatgcgctgaagttggtatgtgactcaataacataacccgtagatgctttatcgcggatctcgaaacagttatctgtgaagctgtaggcaaacacggacataccatcttcgccaatcagtaccttgtcagaaaggttcggatcgacatagatctcgttatcacgcgtctcaaagttgcggatgtagatattcgaccatactggttcgccgttttctgcttgtaccatgctatacagcatcaaaccgttgtactcaagcccatccatgattttgaacatatcagagtagtccagacggttgatcatcaggcgctggatatcctcgtaaacccatctcttctgagcgtcccattcagctggcgctgcttcgcgcatgaggtccgccattacatccgaggctactggattggctaccggataattattggcaaccatcagagtattaaagatgccgatcagctgatttgtatctttcatcattttccccttatttcccgaccgggtaaatcacgccatttggagaaggccacaaaacatctgtgctggcattgtatggaagttctttggtgataatcgcctgcatctttgataaggcagagtgatatggtgagtattggattagtatcaggttatcaaaggcatttgtaccaccgtcatcaaggggaattttgtgatggacctgccaccccgatggtacatttccatttgccaagcgtagaaggttattggaatcaaatgttgataatgcgtcagggtgatcggaaagagatttgagaaaactaggccgcacagtgctgttgaattgcccacgcagcgcattgtactcggcacgattgcggcggaggtaattaagctgggtaacattcatatcatccagcagaacatgggcttgtttgtatttccccagatagcttgtcaattcctgcgccgccatcggatttctgatgaccaatagtgaggccgcagcaaccatcatgccggacgtagtttcgtttaaaacactgtcataccccttcacagcatcgccgcccagccgttccgcggtttgccgaaatccttcaatgttgccgttatacacaccaccagccgctagcagtctgccaacggctttactgttcagcgttttcccctctggtattgctgccgggccgtaataatcgtaatgcatccgttgagtgggagcaggtttacgcccctgtcggtcggcaatagcgtgccggtaggcgctcgtgatttcatccttataccatgcatgccaggatgaggctgtagaggtaaaaatcagatcgccggtatcgtcgatgtaaaacgggttccggtcgctgctccagcgcctggaggtatccacaccaacaagccagccaatttgtagatcgtgctctaccttatcatagatgggatctacgtaactgcgatgtcttcgttcataaggtctttcatgtggagataaactgtactttttattgggaagaccaaaagagagactatggccgttcgcttcataagacagatcgtaatgtatacacgcctctctcagcgagcctgctggcgtcaaaatgtattgaaaatcttcaggggctaattgccgtgttaaatcatgtgaccggtaaagttgaaacatgcgatatccttatcctttcattttataagaattctccaaccttgcagattaaaaatcaaccaataaaaactctaaacatttaacaatctattactggagatcaatactaccagacatctactgccagcaactctcttaatttagcatattaatatcctttttgaataaaaaccattagtcattattatagacagagttatctctttatctttgtaaattgccccgatgccattccagataacaatacaatgaaacgttatatgcctttattttctccggcaacaaaatctgttctttaaaagtaatatccaattcataatttattaataaacgtccatcgttctcatacgaaatccatccttgatcgtatagaatatcaatatacgcagctaatataattccattataaggatcaagacgctcatcaatcgttcccgttacagggtatgccggatacagcatgaaacaatttttccgaaaggtacccagccccagccgggccgcaattagctgctcgcgtacggtatcttcaatacttttatcctgcagaataataagaccgtcacgttgcgctgagtgagaaagcgtagcaggagtgcccagttcgtcacgccagccaacacgcacattagtaagccacgaatcaaagcggtcacggctatttttcagactattgtgaaacttactggcggttttgcccgctccaaacgaggacagaacaaggcaaaagcctcttttcatttctgaacctccagtcccacggatggttgagattaaccgttcttcgacaaataccacgccacttcaagcaaatcgtcttcagatattttgaatgttacgtcctgtttttccagcgtaaatcatcacctgattatgtctgaaaagatcgttacctacactgatcaggttagttgttttggcaaaaacatctcacaccggttttcatcatcaacaagcactacatgcaaccagcaacacaaaaagaacacgccatgcccccacaaaatccgccaggagtggctgacgctggacgaggccgcagaagtcatccggcagcacaacatcacgttgctacccgccgaccttatccgccattcttttagttggcgcaaccgcagtttttgtctgtgatgctgctgttactgccaaccgcgttatggtccgggataacggtatagatggtaggaagtggctttaagcagtggttatatgttgctcaaaatatcgtccctcactacaatacgaattctatcaggaatggaattcggattatgaataaatctgtcataaagctgttgaataaaaaattcattatttcagtaataacctcatctacatttattactggatgcacaatggctgttatatggttctatctgtcaaatattgatagattagatattttctttgatgctgtaagcctcagttcagccttgggtatcattttcgtctttataatagtatcggtttcgggatttagcttagtaattttcatctcctcttttattctaatgctcatttacacagggcatgaagataatttcaaagattattcaagcatgcctcatcgaatttccattgtttgttatctaaatagcttgtttatatgctgtggtatgattgttggctactacatttattatctttatggatggaatggttatttaataagtggcacctgcttggtgttgatgcttgcttatagttatgctgtatcttttttaaagttatttagaatacagagattccgtttgcatgaatctgataactatgagaaacttccaaggaaaaaaggattgttattttttttacccttgcagcttatggctcccgggatcgttcagatattacctttattatttctgcttacccaacttgattttagtgaggggacaagtgattgggttgaaatactaatgctccttgccttaacagtggctattgttactattggcattttgcctggtgccatacatcttaatgagcgcagaaatggcaataaaatcaatagcttcatagttgttttaatatgcataccagttgtaattactttattcagtgtgtggtatcgccccatcccaaatatgatcattaatatggcaatgagtctctcgggtattagcgattggagaacgcatcagtattatgttgaaagcaaaactctttctcatagtatgtttaatggattaatctggaatactcgatactataaagaaattcccgggaggtttttcatcaccggagtcagtacatttaccttaggggatataaagttgatatgcccaactgaaataactgaaacaaggaaagagagtttgaagtttaccgttaatgatatcaatgagtatgagcaaaaagggaaacagttaaaggcagtagccatgcaatgcatcccttttaataagaacgatattcatgcctgggattcgccattatctgaaccgatctattacgagaaagttaaacagaccatagataactctatgctaaaaattcttcataccctgaaatgaggttttagaggttatctttatcacgctctcctattctgctcatcattatgggcaaccaggagagctgagcctacccagcaatagtggacacgcgactaagtgagtaaactcttaaccagaggtagctcacatgacaaaactagcatcaaccgtataaaaatccgcaggcagcactcatctcaattccgttaggaagcctttaaactggctgctgaaaacgcctgtttcaaactccagctggcggagcaggctattctccaaaaggccgtgacatatttcgcgaaacgcctgaaatgaacactgtttttattgaaaaatatcaggctgagttagcatcaaaaccatgtgtcgtgtcctccgtgtggtggtatgtctggaatcagcgacgcgcgaggataaactcacgccagtagtttcgtatgagctgcgatagcgccgtatacgaggcttttcactgggcaaaacagcgttgcggcgcaccgcgcctgaacgatgaactgcatgctcagggttaccggtttaacgtgaaaaccgtggcagccagcctgcttcgtcaggcgctgaatgggaaagcgtcacagaagctcagtcaggtcagttaccgcgaacatggcctgccggtgtcggaaaaactgctgaaacaggatttttacggcggcggcccgaaccagaagtagtcggttgacagcatctacttacgtatggatgaatgctggatgtatctggccgttatcgtcgacctgttgtgacgggcaattatcggctggtcgatgtcatcacggatgacagcacaacagacgtgtaatgcgctactggggcggcataatctgggcgatagcatgagtgcaaagggctgctgttacgataacgcctgttccgaaaacttcttccacttgctgaaagtcgtatgcattcacggtgaacactttctcagtcgcaaaaaagcggatgacggtatttaaatatatcgaatgtgattacactcgctggcgtctccaaagtgcttgtcgcgtactcagcctagaacagtttgaaaatcagagccttgcttaggactgtgtccatattacgtggataggataatagcgccaatacgccctgtaacgagagaactacccgttataggggagccgtttgtatcggttagccaaagatatgctggatttgacatgattattccttatctctatttataaatgaaggtaaacaaaatattataatgacccataaaaacagaccaataatcttaaccggccacgggtcaagtaaggctatgcaaacaatagcgcctataattagtagcggacctgatagtaaattaaaaacaccgcttatcacacctatttttgttcccagcaatctattcaacgcaatggcgatgatgtaagcgctgccgattgtaatcgttactgcaattattttattctgccagttattaaactcagccaggcaaataaagcatgtggtaataatataggtgcagagaactatatcgacgagtggcgtgataatttttttcatatcacccagccttagcattcgtatttaaatgatcttcaactcttttcataatcttgtcgaatacggggttgccctcggtgtttcctgcatggatggcatcaacaaaaggttgtaccgcatcggcaaataagaaataaagaagatcataatcgcggggtcttaataacgagtatacctcgggcgcttcattcctgagtttatcagaggtcctgatggatcgctctgccattccaccaaacaagaggatagtacttaaaaaggatattggattccccttccccttaaatactacataagtaaatgacgttttttctataacggctttagcgatgttcgatgcgataatattcgtagagattctacccacgatagaggtaactacacttctgtatattctatcttgttctgattcggatagatatttattaaataactgaaagattaatttaactgcatataacgatattttcatagttaaggatgtcgtgtcttatcgcggtcatcatacggattctttctgtttcacgttcatatcttgtatccgtatcaaagataccgtaaatcagataaccataatctaaaggaacagataacccaccattgataagccctgtaactgtatcaggagagataatgatgttatataatttccgcgctatcccttctatgtctgccatatagctatcctatgtttaaataaatgactgaggatgtacatcatttttgcaagaaataatcgatggtaatttacaagagaataaataacttgataagtgttactataacctaattgttacaaattgtattgcaaaatgattttgaaccattgatttaaataaggcttaaaacagcatagtatatcactttacggttgattattatgatgaattatcttggtgtgagatgtattaatttaataaataataaagcgcatataagtattcgataagtgattggatacgcaaaaaatttggatgttaaaatatatgtatttgctctgacttgttcatggcagaaacaggttatgactcatgaacaggcggtttatgtgaacacatcgacagcatcatgttgtgccgtcgatatccttcacgagcaaacattgacggattcaccagagtgatatccgcttccggcgtgagagcgggggctatagccaagtgtttgaaaataaataaaagaagggctaacaccaatcgtttcattacgttctgccgcgaactacggcgggggaaaagcgattggtttgcattatggcgtgacgaccgcggaattgacgatgagacgtgggtagagggtgtgaaacgtggtaacttccgtttgcatccgggtacggtttccgagggttgtattactatcacccataattctgatttgccatgatccgaaatgcgcttatgaatacatcgttagtacaggttccctgcatgcgttccctgatggctcgcggttgggtggaggttgttgccagtggctctaataacgtttgctcgtaaaatcagtaagattatttattttatattgctgtttttggttctgggacgtgcacttccaaggccggaaatctatctcgattatgatatcgcaagggatatttgccacttcttgttcgggagtgtgaacgccgatacgatgtatgacactttcttttatatatcgctgataatagtaatattcctttcagctgtactctacattattacattgcagttaatttcaacgataaggagcaaatgagatgccaattcctccgtatatgtgtcttaaagacgatggtggtgcagacacgaaaagatctgttgatgttcaggagcgagaaggtagcatcgaaacccgcttatcaccatcccccctcatcccctgaacacctcccgccggtgccatgccacaaacccttcctgcggatagcattctttcccctgcggcaaggtaatcggcttaccatcaaaatcccagaacagcctgccaacaatgcccccgccgttcaccgctggcgaaacctggatgcgcatatcctcatccagaccaatggatcctttatcaaaagccttatggtgaatcgcgcagagcgccaggccgttagggatttcgcaggggccgccgtgctgcttccatttgatatgggccgcttccagggcgacagaggtattatcatggcgcatattgaagccgcagatagcgcactcatagttataggcgcgcagcacctgctggcgaaaatgcgggtcgcgctctttacggatttgctgcagatcaaaccccatctcttcagccagttcttcctgaatactctccgggaaatgcgcctcgaggatctgatgggcgagggtattgatcagcctcttatttctgttaagtaacgcaaaatgcggctcatcgaagccgccggcgacgtgacagagctccagctctttgccgggcggctgtcggctgccctgggttgaacactggtcgctgttgtgcagctcccagaagccgtcgcctttcaggcgccagaagggcatatccggccggtactggcggcgctgcgggccaaagcgttccagcaggctatgcagctcatcgcgtatctccgaggcgtagtcgaacatccgcgcatggccgcgctggtactgtgagagaacgtacagcagcaacagtggcttatgcggcgcacgctgttcgcctttgcgccagatagtgatgttctcgatcgcgtgttgcagggtcgtgctggagggcatagcgttacagtggcagctaaataaatgcgatgatgctcgcaaaatccttgccgatcaacccaccagatgcggcggttctacgtggatcgcgatttaactatcactgctagttatttgttcgaaaagcccatagctttctatttatactcaagcttcgcgccatcagatagctatgtcttatgaaaaaactaccggaccatttatccagggaatgcatcatcgccgccattcgcgcttacgatgcaggcgttgcgcatcagtttaaaagcgcgcgtctgtatgagatcgagtttgaggggcgtcggtatccttcaaaagccatcgtcgggttagcggccacgcttgcgacgggtacggaatttaccccggcggatttcagcggggggattaaatccaaatgcgtgcgcctgttactggagcaaggatttacgatcgcgtcgcagggcgctggcgatgacgaggttgcgcttttccccgatgagggacagacgaccatggagtacgtggaaggggcggcgatgcaggtggtgatcaatcgttatgagcgcgaccgtcaggctcgtcaggcggcgcttcgcctacacggctgccggtgtcaggtatgcggtctggatatggccagccgctatggcgaaatcggccagggttttatccatatccaccatctcattccactgtccgggatcaagcaggactaccgtctgaatcctgaaaccgatctgatcccggtatgtcccaattgccatgcaatgctgcaccggcgagatccgccgtttactcccgaagagctgaaggcccggctgcgccccgcagactgacatccgacagcactcgctttaattacatcacacacagcacaaaaccccacgctacctcaccggtagcgtgggcccgccctctcttacttatcccgcgtctcgccagcctcccagctgtagctgccatcggccgctaacctatcgcccagctcctgatactcgaactgataaaactcagcctgggtgccgtacccggcgtagtctaccgccgccaggccgacgaacgccccggtaaagaacccgccgtagctctgcaacacatagtcatcggacagtaccgcggcatccagctgaaccgggatctcggtgaaggtcacgccatcgaagctgtattcatagctgtaggtctgcttgcggaccttggtccggaaccagacgtattcgacgccgtccggcaccttgatggcgttatctttcaggtacgacgtgtatttcccgcggttattttcgccgacttcgatgaccttgccgttaatttcattccaggtcaggaagacgaagctccagtggcggtcgttatagtaattcgttaacccggccatctgctggtagctgaagggttcgaatttcaccttcaccgcggcgtcaaaatagaaggcctgccagcggcgggcaatcagcgacaggtcatgcgtattggctaacgaaccctggccgattaaggttaatttgccgttgccggtggtgcccattttggccgtaaacggcacccgcagggtattccagttcgggtcgagcgctggcgaggtaaagtcatcctgctggctattatcgctggcgctttcggtgaagatggcgtctttcggcccttcgacaaaggttttcccgccgtgaccgccttcaatacgcggccagccttcgtcgtcccagtacactttctggatcgcggtttcccggccgagggttgaccagccgcgcgggtcgtagatggattcccccgggcgattccatggccgggcgcagagcgaggcgtaataccattcgccttccggggtggagaccagcgcgccatggccctgtttctggatgtagctgtccggcgtgtcgacgttggttaagaacacgtcacccggctcggtttcgaagctgtcggcctcgagggttttcgaccgcgccaccacctcctggtgggtaaacacggtgccgccctgggcggcaaacagatagtagtagccgttcagtttatagaggtgcggcccctcgaccagcgccacggcggtgccgcggtagatggtgcgcgcggtttccggcattaacttcagcgtgttggtatccagctccgttaaggtaatgccatcgaaggggtgatggtactcccggtgatcccaggtttgctggacgatatatttccggccatcgtcgtcatggaacagcgaggcgtcaaacccgacgccgttcagcttgatcgggtcgctccacgggccccgaatatcctttgcggtggtcagatagttggtcatgtctttgaaggcgccttcggtgaccttcacatcggtatacaccaaccagaattgcccgtcggcccaggagagcgccggcgcccaaatgccgccggaggaggggttgcccttcatatccagcagggtggtggtggagagcggcgaaggcagcaggttccagtttttcaggtctttggactcatgtaaacgcacgcccgggaaccactcaaacgtcgagttggcaatatagtacgtatcctcgacgcgaataatactggggtcggcattaaagccgcgtaatatcgggttttgaataagtgacatttcattacaccttttaaaatggaaagttaaggatcggtctgatttataatttttttaactacacgcggatctcatccagctgacggttgatgtcggtaacatgtttatcggagatcggataaacctgcatgatcaccatcgaaatagcggccagcgcaattgggatccacaccgcggtcataatgatcccgtcgatggcgctggcgctctgcacggcgccgctttcattaaatccatacaccgccagcagccacagcgggatagcgccgccgatggtgaagccgatcttgaagaagagtcccataatggcattgataatggcggcattgcgtttgcccgattttaattcgccgtacgcgataacttccggtaccagcgcccacataaagccggtggcggaggttaagccccactgtttaataaaggtggcgatgtaggccagccacagggcgtcgtgcatcccttcgcgggaccagacgtaggtcagcagttcgccgacgatgaacatggcgaggaacagatggaagaagccttttttaccaaagatttttttcagtttcggccagaacaccgggaaggcgatgccgggaatagacgcgacgagacccaccgcgcccatccattcggaatggccgacgacgaactggttgaagaagccgttaacggtgttcatgaagaacatgaaggtaaaggccagcataaagaacatgccgagaataaccagcggacggttatgtctgagctcgtggaaaaggtcggtagttttgacgttggcggtctgctcggcggtcgcgacaacgcgttctttggtgcatttgtagcagataaacagggccaccgcgccgatgatcatatagatggcgtacacgccgaaccaggcgtagttcgctgacggatcggtatagttgccgagattcagctcaaggccaaaaaagccggtgtctttcaggctgcgatctttcggcgccgccatctgcacaaacatcgggaacagggtatagaccagcaggttggcgctgttggccagcatcatgcgggtactggtcagcttatcgatcgattccgggtcgcgggtcagcgacgcattcagcgagccatagggaatattgactaaggaataaaccaggtccagcgccagataaataataaaggcgaaagccaccgaacctttcaccccagggattggcgcgaacagtaatgccgacaggatcaccagcggcacgccggctcgtaacagccagggacgatatttccctgcttttgaggttcgtttatccacataagttccgaccatcggatcccaaaacacgttaatgatgcggacaaaaagaaaaataaagcctgccgttgccgtgctgatggtatttaccgtcagcatatgcaaagccagaaaacccccaattgtgccgaaaaccaggttttgcgcaaagtcgcccatgccataaccaattcgttctccgcgggttaatttatgatattcatcatgccgactgtgcattatgtttttactcattctaagcagactccggtttgttttgtgtaggtgaaacactttctgacacagttgaccaggaagaatctattacgtttttaaattacgtaattatgtttttttacttctgtgatcctcgaagcaaaggcctgtatcacctgcgttaaaccgttttccgccgctaattttcgggcagacagacaaagtgacaaaaccggcattttaatttgatatggatacctgaattccccagggagtgtactctatacgcgcgcgaagcgagatatttaaaatagttttatttgcgagatggctcacatttgagcattttctcaatcgccgagtgaaataacgtaattgagcaaccgacgatgagaatacacgatgtgtcacagttgttaattttcctgtttctcaatttcggagttcatcatgcaaacctatttcgaccaggttgatcgcgttcgctttgccggacccaaaaccgataatccgctggcatttcgccactataatccggatgaaatcgtgctgggaaaacgcatggcagaccatctgcgttttgccgcctgttattggcataacttctgctggaatggcgcggatatgtttggcgccggttcgtttgagcgtccctggcaggccgcgggcgatgcgctggaaatggccaaacgcaaagcggacgtggcgtttgaatttttctacaagctcaacgtgccgtattactgcttccacgatgtcgacgtctcgccagaaggcgcgtcgctgaaagagtatttgcataatttcgccgtgatgaccgaggtactggcggagaaacagcagcaaaccggcgtgaaactgctgtggggcaccgccaactgctttacccacccgcgctacggcgccggggcggcgaccaaccccgatccggaggtgtttgcctgggcggccacgcaggtggtgaccgccatgaacgccacccaccagctcggcggcgaaaactatgtgctgtggggcggccgagaaggttacgagtcgctgttgaataccgacctgcgccaggagcgcgagcagattggccgcttcctgcagatggtggtggagcacaagcataagattggctttggcggcacgctgcttatcgagccgaaaccgcaggagcccaccaagcatcaatacgattacgatgtcgcgacggtgtatggcttcctgaagcagtttggtctggaaaatgagatcaaggtgaacattgaagccaaccacgccactctggcggggcactctttccaccatgaaatcgccagcgccatcgcgctgggcattttcggctccgttgatgccaaccgcggcgatgcgcagctcggctgggataccgatcagttcccgaacagtgtggaagaaaataccctggtgatgtacgagatccttaaagccgggggattcaccaccggcggcctgaactttgacgccaaagttcgtcggcagagcaccgacaaatacgacatgttttatggccatattggcgccatggacgtgatggcgctgtccctcaagctggccgcgcgcatgattgaggatggcaagctcgatcagggtctggcaaaacgctatgccggctggcagggcgagctggggcagaaaattatgagcgggcagatgtcgctggataatattgcccgatacgctgagcagcataatctgaatccgcagcctcagagcgggcgtcaggaattactcgaaaatctcgtcaatacctatatctttggttaatttttgctgacatgcccccgcgggggcatgtattccgccgtctatccgctgccgggaaatagcgtttattggttcgtgctgtgtttttttgtcagtggcgaaagaccacctgtttaatatcagcgaaggaggaagggtaacgataattgtgtaacgcctctgtgaccgtacaaaataaaaaataacttgttctgatgatagcgacatattctgtcagctcagaataggctggttattgtctgaataaaattaacctatattgagaaactcatgacaatgataaaaaaacttccattaaccatggcggttatcgccgcgttttttccgcttacctctgtaatggcgcaagaatttactcaggaacagatcgacgccatcgtcgccaaagccgttgataaagctctggccgaccgccaggcgaaaatcgacgccgcggccgacaaaaaggtcgacgtgatcaccaacccgcagaccaccgccgcctcgccggatatggccattccgttcggcctcaagttcagcggctatgcccgctatggcgctcacttccagaccggcgaccagaaatatgtcggcgtcgacggctcctataacggcgcctcggcgatcggccgtctgggcaacgaaagcaacggcggcgaattccagatcagcaaggccttcaaaagcgcgcagggggctatctgggatcttaacgtgatgttcgaccactggagcgacgaagttaacctgaagaaggcctacgtcggggtcaccaacgtgctggaatccaaccccaacgcctatatctgggccggccgcgacttccaccagcgtccgcaacaggggatcaacgactacttctggatgaaccacgacggccagggcgccggggtgaagaactttgatatcggcggcgtgcagttcgacgtggcggcggtgtcgcaggtgaaatcctgtagtccggaagtgatggccgatgagaccaacccgtcgcgcatcacctgtaccggcagctccgacaccggcgacaacggccactacgcgctgaccaccaaaacccacaacatcaaggccgggccgatcgacgtcgaggtgtacgccaactacggctttgactcaaaggcggtggacagcgacgcgcgtctcgaagcctggcagggcggcctggtgctgagccacaccaacgacagcggggtgaacaaggtgatcctgcgctattccgacaactcggataacagcgtctataacaaaaccgacgacctgaccacggtctacgccagcttcgagggcagccataagttcacccagcaggcgcaggtggaatatctgctggccttccacgactacgacaacggcaaggacaataccgataaccgtaaaaactacggcgccatcgtgcggccgatgtacttctggaacgacgtgcactccacctggctggaagcgggctaccagcgcgtggattacgaccagggcggggataaccacggctggaagctgacgctgtcgcagaacatcgccatcggcatggggccggagttccgtccgatgctgcgcttctacgtgaccggcggccaggtggataacgagcacaccgcgaaggtaaacggcacccaggaccagcagctggattcgctgaacgtcggcggaatgtttgaggcgtggttctgatgcgatagcgttgtcgaaggagcgttcccggctggcgctacgcttagccgggctatgactggtgcgctccatttatgccggatggcggcataaatgccttatccggcctacgttccttcctgcgggctcccccccaggaccggcaagcgcagcgccgccgggcggtcaggctccatacctgcggtagtgacggatggcggcataaataccttatccggcctacgttccttcctgcgggctcccccccaggcccggcaagcgtagcgccgccgggcagctggcccatcccccttcagttcaccgtcaggcgcagggccagatcctgcgggtagggatcgaaatagttctgcgcctgcaggtagcgatccggatactcggccagatagtgcttaagcagcgtcagcggggcgaggatcggcagcagcccggcgcgatagttgaggatcacctcccgcagctcgccgcgctggcggctgttcagctggtcgcggaaataaccctgaatatgcatcagcacgttagtgtggtttttccgcgaggcgggctgcttgaggatcgccatcagcttctcgcggtaaacctcgaagaacgcctccagatcctcccattcatgcagcgaggcgacgaacgggccgatctcccggtagcccgcctggtggtgagccagcagctgcagcttgtagcggctgtgaaaggccagcagaccgtgacgggtcaggccgcgggcgcgcagggcgttgagttcatgcagggcgaaaacgcgctcgacaaaattctcccgcagcagcggatcgtgcagccggccatcctcttccaccggcagccacgggtagcgcgccatcagggcgccggtaaacagccccacgccttccttacgcccgcgattgcctttttcgtcatacagccgcacgcgctccatcccgcagctcggcgatttggcgcagacgataaagcccgacagcccgcccagggttgcgaggtgggcgctggcgaaatcagccatcttctccgtcacatcctcgtgcggggcgtggctgaagcgcatgcggatctccccgaccggggtctgcaccaggcggagcgccgggcggggaacgggcaggccgatcgccatctccgggcagacgggtttaaacgccacccactgcgcgagctcatccatcacaaagcccatacgcttatgcccgccgtcgaatcgcacggctgagccggttaaacatccgctgatcccaatgacaggttgcgtgttcatggcgctgtcctctcttctgctgtggttcgggtaaagaaaagggtcacggtggcgaccgtaatgccgaatttcttcatctcggttttgttaaataaatggctgccgtcctgcaggaacatccagtcgtcaaagtgcagcagccaccggctgccgctggcctcgacgttcatgctgtagcgccagtgaaaggcattgcctgccgcctggccgctggccacgccttcgatatcgccggcggtgccctgataacggttatcgccggtgcggcgaatgcgccatatccgctgctgcttctcgccgtcgtcatagacaaagcgctcatggagggtcagggtgtcgccgacgacgtcgccatcgatctcaacatggaagcggcgcagctgcttgccgctgcgatcctgcaccatcccccacgcctcggttcgcccctgaaaatagtgaaagatgtcgagggcgggctgctgctgccggtactccgtgacctcggtgctgcagccggcgaggatcagcatcagcagcgccaggccaagggtcagaatgcgtttcatggtgtacctccgatcaactgctgacgcagttcgggataagtggtgcgcggatcgagccagatggcgagaaagcgggtgctgaacgccgccgactggcgcgggccgagcggggtaaaggcggtctgcgcggcgctggcgcggtaccagaactgcccctcgccgccgctgaccacgaacgccagctggctgcccggcgcgacgtccggccagatcccctgcagcatgcgtagccaggcttcgctgcgcggttcctgctgcagaatgccctgcgcctgccactggtcgcgggtggcctccaccagcgcctcgcgatcgatgtcgcgccggtaggtgatgatcagcgcccgatcctgctgcgggccgtcataccggccattgggcgtacgcagctgcgagtgatagacggtgaacggcccccaggtgagggtcgcctcgccgacgcggcgccacgtcagccagtcggcggcgtgggccgccggggcgaggatggtcagccacagcagtaacagggcgaatctcatttttgcctccccatccccagatggaataacagcatgagcaccagccagccgcaggccatggcggccacgccaagcgccgtcggcaccagcagggtcatggctccgaggcgatcgccgatcaggtaggccaccgggccgccgacggtggcggccgtggccagcacccagccgggaagcgtcgcggtgcgggtcagtcgggtccagacgacggcgaacatcagccacagggccaccatccacaggggcagcaggctgtcgccgcgaaaatcgatcagccccgccagcgcccagcaggcgtccaggccgcagcccgccgcggccaacagcagggcaggcggacggctggccgccggcaaccgcagccaggcgaaaatggccagcgtcagccagatcagcagaccgcgctcgcgcaacatcaccaccagcgtccagtaaacatcgaacgcgagggccatcagcaggtgctgcgccgggcgtgtcatacccgctccgcggtgagctgcaccacgctgatggtgcgggcgttaaatccggcttcgcagtagccgaagtagtagagccacatccggcggaaacgctcatcaaagccgagcttttcaatatcctgccaggcgtgggtaaagcgctgccgccagtgggccagggtgcgggcgtaatccgggcccatgtcgaacaggttgcgcaccacaaaatcggtatggcgggtcatcagctcgctcattgccgtgatgctgggcaaaaagccgccggggaagatgtagcgctggataaaatcgacgcttttgctgtagtcgcgatagtgctgatcctggatggtgatcgcctgcagggccattctgccgcccgggcgcaggcgcgcctggcaggtgcggaagaaggccgggaggtagcgctggcccaccgcctcaatcatctccaccgacaccagtttgtcgtactcgccgcgcagatcgcggtagtcgcagagcagcacctcgacgcgatcctgcagcccggcgcgggccatgcgctcggtagcccagcggtgctgctcccgggaaagggtggtggtggtgacccggcagccgtaatggcgggcggcgtactcggccagcgccccccagccggtgccaatctccagcaaatgatcgccgggagtgagcgccagctggtcgcacaggcgcgccatcttggcacgctgggcctgggtcagatcctgctggtcgtcggtaaacagcgcgctggagtagagcaggtcgtcatccagaaaatgggcataaaattcgttgccgaggtcgtaatgggcggcgatgttctcccgcgcctgggcgcgggtgttgcggcgggtccagtggcgcaggcgggcgacgggcttgcccagcagacggaagccgcgctccagacgccccagcacctcgccgttgcgcgcaaggatctgcagcagcgccgtcagctggtggctctcccagtcgccgtccatccaggcctcggccgccgccaggctgccgccggtcagcagacgccagtacacctccggcgtgcagacccgcgcctcggcgcgcagcgcggcggcggggtcgccaaaatgaaaagtctgcgccccttcgcgcacggtgagcgagccttcgcggaggccgctcaacagacgaaaaagcagccagcgcgcgagccgcacgttgcgcggcacatcgggttcaagcgcaaagacgggatcggtcatgagcgttcactcctgctgacaggatggttgtacagcggcacgcgcttcagccacagccgcagcgcctgccagtagatggcgaggacggttttcagggtcatcagcggcagacgcagcagcagcccgcgcaggttggcgcgggtcaacggcacgcggctcagggccagcgtggcgtcgaacaccttgctggcctgatggttttcaatatgcatgtgcagcgttttgccgggcgcgttgaagcgccagtgatagaccatgtccatcgggttaaagggcgaaacgtgaaaggctttctccagcgggcgcgcctgctggccgtccaccgcgtagtaatgacgctcattccacggcgtgttgcgcacttcggccagcacccagcgcagggtgtcggcttcgtcatagcagtagtaaaaattgaccggattaaaatggaagccgaagtagcgcagctgggtcaggagcatcacgcggcccgccgggcggcagccggtcaggctctccagccggttcagcacctgggccttcagcggcgcgcccagcggataatcggcgtcgtaccaggcggcggcggccaggcggttgcggcggatgcccgcctcaggcagcttgtccagttcgtcgaggtcgagccaggccataaacaggcggtagacgaagtggtgcgccttcggctgcaggcgacggtggcgcaggacgccctgatagaggcagctgttcatttcagtggccctccgccgcggcgatgccctgcaccacgtcgagcgcgctgcgcaccccatcctcatgaaagccgttgtaccagtaggccccgcagtaccagctccgctgctggccgttaatctcttcgcgccgcagctgggccgaccagctttgcgggttaaacaacggatgctcatagacgaagcgctgccagacgtagcgatcgtccaccggcgcgtccgggttcagggtgacgcagaacagcggcgcgcccgcgggcagcccctggagaatattcatgttgtaggtgacgcaggcccgggcccgatccccgtcgctcaggcgatagttccagctggcccaggcgcgctggcgctccggcagccagcgcggatcgctgtgcagcaccacctcgttacgctgccagccgatgtccccgaggacttctcgttcggaatcggtgggcgccgccagcatcgccagggcctgcgcggagtggcaggcgaagatcacctggtcaaaatgcgcctccccggacgccagccgcagggtgacccccgccgggtggcggtccacctgctgcaccggcgcgttgaggcgtagatccaggcgatcgccgagcctggcgagcagggcgcgaacgtattcccgggaaccgccgggcaccacgtaccattgcgggcgatcgcgaatatccagcagaccgtggttttcaaagaagcgcaaaaacagcggcagcgggaagcgacgcatctcctgcagcgacgacgaccagatggccgcccccatcggcagaatatagtggcgggcgaagaaggggctgaaacggtggcgggtgaggaagctctccagcgtcgcgcctggatccagcgcctcggtcagcgccagtttcgccaggcggttgaagcggacgatctcgctcagcagtccccagaaggccggcttcagcagattgcgccgctgggcgaaaagcgaggtcaggctgtggccgttgtattccaggccgctggccgggttgtggaccgagaagctcatctgcgttttttgcccggcgatccccagctcgctgagcaggcccataaagcgcggataggtgcgatcgttgtagacgataaatccggtatcgatggcccaggtgccctgcggcgtggcgacatccacggtggcggtgtggccgcccggcgtggcgcccgcttcgaacagcgttacctgatggtgtccggccagtcgccaggcgcaggtcagcccggcgatgccgctgccgatgatggcgatattcatgagcgcaccatcctgcgcaacagcaggcgctggatacccgatggcagactggccagcagacgcagggccaggctgaaaccggtggggaaggcgatgtggtttttgcccttcgccagaccgtggcggatcgccgccaccgcccgatccacgctcacccggccgggcatggcgaagtcgtttttgcgcgtcagcggggtgtcgacgaagcccggagagaccaccgtgacggcgacccctttcggctcccagtccagacgcaggctattggcaaaccaggtcagcgccgccttggaggcgccataggcttccgcgcgcgggaagggcagccagtgcgccatggagctgaccagcaccacccgatcgcctgcctccagctgcgtctgcagcgccgccaggcagttcaccggcccgaggaagttggtggccatcacccgctccacgagggcggcatccacctgtccgtggtcgaggtattcgcaggtcccggcgcagagaatgatcaggtcggcaaaacagcctgtcagcgcctggcgacaggcgtccctgtctgtcatatcgaacaggcgtacgctaatgttggggctgagctgctggagcgctgccaggcgcgacgcatcgcgcccgcaggcgatgaccagatggccatccgccgcgaaggatttcgccaggccggcgccgatcccggagctggcgccggtgatgatcaccgtcatcatgagcgcaccctccgcttcacgccgcgtaccgcccagcccagcaggggaagatgctcgtagatcatctccccggcgtcgtagtagtcgcgctgatggagaacctgctccccggcgatgtccaccaccgagcagcccggcagggccagggtttctccgccggcaatgcgcggatgcgaccagtgcatggtccaggtcacggcgaaccgctggccgtcgcaaagcggcgtgtcgatggtgaaccggcactgctccacgttggccagcagatgggtaaagtagcgctgaatggcgaacagcccctgatgctgaccaaaaggatcgctcagcgtcgcgtccggatggtacagcgcggccagcgccgcgggcggctgtgcatccagcccggcgtagtactcaacgaaacgacgaatcacggacggcgaggtgctcatggatcacatcctggctagatacggtagcgtaatggcatacttaaaacttacacaaataaaattatttgtccaagtttgtagaaaaatatattttatttgtgttaaaaatcatgttgttatgattggtgttttaaggagtgaaaatcgcgggtggcgcaaagggtaagcgtgagcccgccgcgccaccgggcgctggcggaacagagcgtggaggtaagtgaaaacagggggttagagcgggatcacctcgaggaagacgacctgctgctgccagagttcgacctgcctctggcgggcggcggaaagtttgccgctggtgaccagcagccagttgcgctggggaaaaatctccggcgccagggcggcgggaggcaccggcaggacgtcgatgcgatggccctggccggtacgttttagcgcctcaagccagatttcgcaggcgtcggtcaggtgccagccggtgatcagaaagttgtccccgggcgccttcttgtcgccttcgaggcaaaacgaggtataggcgatgatgatgccgtcgagaatttcgcgcagcgtcatgatggccggcacgttggcggagacctggctgcgcagtggacgcagcacttcggttaccagctcctggcgcggatattcgcgcccggcgtcgtagatcagctggcgcagggactcgatttttccctctttcagccgctgcagcatggtctcctgcagcgtcagccagttattggtgcgccgcgcgccggggcgcgacagcaggggtttcacctggctgaccggcaccccttttttcacccagtcgaggatcttcagcgcctgctggacgtcgtcatcgctgtacagacggtgtccaccatcggtgcgcagaggcttaagcaggccgtagcggcgctgccaggcgcgaagcgtggtcgcatttatcccgcatagtcgggcaaattcgccgatggagtaaggcatggaggccacctgttaacaaagaatattctcaatatactacgaatcacgacggctggcgtgaagtgtagtggctttgcactacactttccccaaccgcgtaaatgaaaggagttctcatgaagctatggcctgttgtcactggcgtcgctatcgcgttaaccctggtggcctgtaaatcgcccacgccgccgaaaggcgttcagccgattagcgggtttgacgccagccgttatctcgggaaatggtatgaggtcgcccgcctggagaatcgcttcgagcgaggcctggagcaggtgaccgccacctacggcgcccgcagcgacggggggatcagcgtcgtcaaccgcggttatgacccggtcaaaaaacgctggaatgagagcgacgggaaagcctatttcaccggcgcccccaccaccgcggcgctgaaggtgtcgttcttcgggccgttctacggcggctataacgtgatccgcctggacgatgactaccagtacgcgctggtcagcggccccaaccgtgactatctgtggatcctgtcgcgcacccccaccattccggcggcggtgaagcaggattacctgaataccgcgcgcgagctgggctttgacgtcgatcgcctggtgtggatccgccagacgccgcgctagcctcgccgcttagcggctgagcagatgggtataaaccacgtacagcccggccagcgccgccacgttgagcgctacgctgatgaaaaaccgcgtccggaagggctgcttttgcgttttatggcgaaagcactgctggccgaggatggcccccggccagcctcccgccaggcccagcaccagcagcgtggtttccggcacccggcgccaggctttgcgcgccgccagcttgtcggcgccatagataagccatgtcagaaggctgctcagtaaaaaccacatcgccatcgggtagggcagcagggtgctgcccacggcggtgagcagcagcagggaataacataccaggttcagattcatagggacgttcacgccggccagaagaatggcgccactatagccaatttcccggaccggcgtaaacgcggcgggctattggctacgcttgccccgatgccgggacagccacatcagcttatatgccgccggaatgataaacagcgacagcagcggggcggtgatcatcccgccaatcatcggcgcggcgatacggctcatcacctccgacccggcgccggtgccccacaaaatcggcagcaggccggcgataatcaccgccacggtcatcgccttcggccgcacgcgcagcaccgccccctggtacagcgcctcgtcgagcttatcgacgctgaaagtctgcggattctccagcgatggctccgcctcgatggcgtggcgcaggtacatcagcatcaccacgccaaactccgccgccaccccggcgagggcgataaagccggtcccggtggccaccgacagatggaaccccatccagtagaggaaccagatcccgcccacaagggcgaacggcacgctggtgataatcagcagtgcttcgccgacgcggcggaacgccagatacagcagcacgaagataatcattagcgtcatcggcaccatcagcttcagcttctgattggcgcgctccagcagctcaaactgcccggagtaggacacactgatgcccggcttcagcttcacctccttgccgatggcctgctgcagatcgtgcactaccgacaccaagtcgcggtcgcgggcgtcgatgtagatccaactggtcgggcgggcgttctcggtcttcagcatcgatggtccggtgaccactttcacctcagccacgtcgccgaggacaatctgttgcttcagcggcgtgaggatcggcagctggcgcagggtctccgggctgtcgcgatagctctgcgggtagcggatgttgatcggatagcgctcgacgccctccactgtttcgccaaccatcgccccgccgatggcggacgagacgaacagctgcacgtcgccgacggtcatcccgtagcgggccgccttctcgcgctgaatatcaatgtcgaggtagcgcccgccgaccagccgctcggctaatgccgaagtgactcccggcacgctgcgcgccaccacttcaatttgcccggcgatggcgtcgatatcggccaggttggtgccggaaactttaatgccgatcgggctcttgatgccggtggagagcatgtcgatgcggttgcggatcggcggcacccacaggttcgccagtcccggcaggcgcacggttttatccagctcctcgacgatcttctccatggtcatccccggtcgccattgatcctgcggcttgagctgaatggtggtctccaccatctccagcggcgccgagtcggtggcggtttcggctttgccggttttgccgaacacccgggccacttccggcaccgtcatgatcagcttatcggttttctgcagcatatccgccgcctgcgcagcggagatccccggcagcgtggacggcatatacagcaggtcgccctcgttgatctgtggcagaaactcgccgccgacccggttaagcggccagacaaccgtcaggatcgacaggagcgcgatcagcagggtggtcttcggccagtgcaggaccttcagcagcagcgggtgataaatgcggatcaaaaagcggttcagcggattgctgctctccgccgggatcttgccgcggatccagaagcccatcaggattgggatcgccacgatcgccagcagcgccgccccggccatcgaccaggttttggtgaaggccagcggaccgaacagtttgccctcctggccttcgagggtgaaaatcgggataaacgacagggtaatgatcagcaggctgataaacagcgccgggccgacctccaccgaggcctcggtaatgattttccagcgtgtgtcgttgctgagcttctctcccgggtgctgatgctcccattcctccagccgcttatgggcgttctcgatcatcacgatggcggcatcgaccatcgcccccaccgcaatggcgatcccgcccagcgacatgatgttggcgttgagcccctggaaatgcatcatgataaaggcgaagcacaggccgagcggcagcgaaataatcgccaccagcgccgagcgcacgtgccacaggaacagggcgcagaccagggcgacgacgataaactcttccagcagcttgtggctgaggttgtcgatggcgcggtcgataagctggctgcggtcgtaggtagtgaccacttccaccccttccggcaggctgctttgcagcgatgccagcttcgctttgaccgccgagatcacctcgcgcgcgttcttgccggagcgcaggatcaccacgccgccggccacttcgccttcgccgttaagctcggcgataccgcggcgcatctccgggccaatctgcacccgcgcgacgtcgccgagatagaccggcacgccgttatccccggttttcagcacgatatttttgaagtcgtcgagcgtctgcaggtagccgctggcgcgcaccatatattcggcttccgccagttcgacggaagagccgcccgcctcctggttagaggcgtccagcgccgatttcacttcgccgagactgatgccgtactgggtcagcttcatcgggtcgacgacaatctgatactccttgaccacgccgcccaccgacgccacttccgagacgttagggatggttttcagctcatattttaagaaccagtcctgcagggagcgcagttcggcgaggtcgtgcttgccgctgcggtcgaccagcgcgtactcgaagacccagccgacgccggtggcgtccgggcccatttcggcgctgaccccggcgggaagtttgccctgtacctggttgagatactccagcacccgcgagcgcgcccagtaaggatcggtgccgtcttcaaaaatcacgtacacgtaggagtcgccgaattgcgagaagccgcgaaccgttttggcgccggggaccgacagcatggtggtggtcagcggccaggtgacctggttttcgacgatctgcggcgcctgccccggatagcgggttttgacgatcacctgtacatcagagaaatccggcagggcatccaccggggtgtggacgatagtccaggttccgcagatgctgagaaacagcgccgccatcatcaccaggaagcggttggccaccgagcggcggataatccattcaatcatggttccgttccttagtgcgcgtgggcggcagaggccgcggcatcaggggcctgcgcgcgcatgcgctccagcgcgccggcgatattggcctccgagtcgatcaggaacaggcctctggcgacgactttctcaccctcctgcagcccgctgcgaatggccgtgacgccggcggattcatggaatacctgcacgcgtttcggcacgaagcggccctcgttatcgacggtgatcactcgctgctcgctgccgctgtcgatcagcgctttggaggggatcagcagcatcggggcgctttcgctggtcagctgcagataggcgttcatccccggcttcagcgcttcatccgggttgttgacctgcaggcgcagctgcagggtgcgggtggcgctatcgacgctggggagaagggtccatttgctgatgcggaaggttttgcccggccaggcgggaacctgaatgctgaactgcgaggcgtctttaatcagccaggcgatggattccgggaccgccacgctgacccacaccgggtccatgccctgaattttcgccaccacgttatctttggcgatgttcattccggcgcgcagatcgaaggcggtgatcaccccgtcgatgggggctgtgagggtaaagcgggtctggattttacgcgtggctttcaggcggcggatatcgtcgtccggcattccggcaaggcgcaaacgctcgaggatcccctcgacctgcgtagcggtgcccccggtctcctgcaatagcagatattcgctctgcgcttccacccagtcggggatggtcagctcgagcagcggcgtgccttgcttgactttgtcgccgacggtcaacggatagactttattgataaagcccgccgcccgcgcctgcataatcacatactggtactcgttatagctgatgttggccgggaaggtctgggcgtagcgcagcggcccgcgggtgacggcggcggttttcaccccaagattctgggtctgcgtcgggtcgatacgcacccccggcgcaccggcggcggcatgctcctcatcggcgtatttcggcaccagatccatatccataaacggcgatttacccggtttatcgaagcgggtgttcgggtacatcggatcgtaccagaacagcactttacgctgctgctcggccgccggagcggcagagtgggtcggagcccatcgggcgtacagcgccgcggtaagcgcgccgccaatcagcatgctgccgaggatcaacgccgtatttttaagtgtcagggatgccatgtgtcgtccattcagttgttgaggggcctaccgtcgccgggccgttattgggcgcggatatcctgcagcagcgacaggttgccctgctgaacgaaggtgaaatccacgctgtcgccatccttcacattgttgagctgcgtctgcggggtgatggtgaagcgcatggtcatcggcggccagttcaccgccgggatggcctcgtgggcgatagtgatttttttattatccatatcaatagctttaatgacgcctttgccgcggatgctttgcgcctgcgcggcggcgggctgctcgtgcatcaccataccggcgtgcgggtcggcggcctgggcggcgaacaccgcgccagagagcagggtgaacagggcgattttagatagtgaattcatgttcgggactccttgggttattccatccagccgccgccgagagcggtgaacagggtgatttcatttgcctgacgggaatagttgagttccagcagggtttgtcgggtggtgaaaatatcgcgctgggcgctcaggacttcgatatagctgaccgcgccgtggcgatagagcgcggtggcgcgctgcagggtgatattcagcgaggcgagatagcgctcctgcgcggcaatttgatcggccaggctctggcgcagggccagcgcgtcggccacctctttaaaggcggactggattttttgttcatagttgaccacctgctgctgctggcggatctccgccagatcgaggctggcctgattacgcccggcgttgaaaatcggcagttcgattttgggaatgaagttccacatcgcgccgccggcgttaaacaggctggagagttcgctgctgctgccggagagcgagctggtcagggtgatcgacgggaagaaggccgcccgcgcggcgccgatgttggcgttggccgcttgcaggctgtgttcggcttccagaatatctggccgctgcagcaggatcgctgaggagagcgatggcggcagggttacgccttgcaggtctaccgcgctgctggcgctatcgtccggcaggcgctgatagctgccgagcagcagttgcagggcgttattggcctgcgccagctggccctgacgtttggcgatatcggcgcgggtgctttcgatcatgccgcgcgcctgctccagcgccagcacggtggtgctcccggtcagcagctgtttttcaacgaaggcgtaagactgctgatagttctgtaaggtatcgttggccacctgcagctgcgctgccgccagccgctggttgaagtagctttgtgaaacgttagcaatcaacaggatatgcactgcgcgccgcgcctcttcgctggcgaagaagttctgtcggtcggcctcgctaaggtttttcagccggccaaagaaatcgaggtcatagctgaggtttaagccggcggcataatcgctgctggtggtggtgtcgcctttgagcttgccgccataggtggtgctgccgtcaccgttaagctgtgggtagcggtcggcgtcggttacccggtactgggcgcgggcttcctgcactttcagcgtcgccatccgcagatcgcggttgttggtcagcgcggtgctaatcaggcttttcacctgcgggtcgacgaaaaaggtgcgccagccggtctcttgatagcccactttcgcagtaaccagcttgttctggctgagagagaactgctgcggtaccggcgctgcggggcgctggtagtccggagcgagcgacagacagccggttaaggcaaatatcacgctgagggtaagtagctgtattgaacgcatggcggcagacggtttcgacgatttatccatggcggctactttacgtagcgggctctgttcagggcgtgacgggaaaatgacaaaactgtcattttcctgatatttcattgctatccggaggcgctcctctaaaattgaatacccgcacaaagcgcgcgtgaaggagcctgccgtgaagattttgattgtcgaagatgagaagaaaaccggagagtacctgaccaaagggctcaccgaggccggcttcgtcgtcgacctggccgataacggcctcaacggctatcacctggcgatgaccagcgattacgatctgctgatcctcgacatcatgctgccggatgtgaacggctgggatatcgtgcgcatgctgcgcgccgccgggaaaggcatgccgatcctgctgcttaccgcgttgggcaccattgagcatcgggtgaaggggctggagctgggcgctgacgactatctggtaaaaccgttcgcctttgcggagctgctggcgcgggtgcgtactctgctgcgccgcggggcggcggtcatcgtcgaaagccagtttcaggcggccgatctcagcgtcgatttggtcagccgcaaggtgacgcgcggcgccacccgcatcaccctgaccagtaaggaattcacgctgctggagttcttcctgcgtcatcagggcgaggtgctgccgcgttcgttaattgcctcgcaggtgtgggatatgaacttcgacagcgacactaacgccatcgacgtggcggtgaagcggctgcgcgccaaaattgataacgacttcgagccaaaactcatccagaccgtgcgcggcgtcggctatatgcttgaggtgccggatggccgctaagcgccccttttccctggccacccggctcaccttctttatcagcctcgccaccatcatcgccttctttgccttcacctggatcatgatccattcggtgaaggcccactttgaagagcgcgacgttcacgatctcaggcagctcagcaccacgctggagacggtcctcgaccacgctgactacccgcaggcgcggcgtctggagatcgtgaagaatatcattgcgggctacgccaacgtcttcatctgcctggacgatggccagggcaatattctcttccagtcgcccaacgggccggatctcagccatatgctgagtacgccggggctggcgatgcagctccgcgacgggaatgtgatttcatggaccgacccgcagccgcgggcaatggcgcacgataatcatccaatggaaacccgcgcctggcggctgatcatgctgccgctgggcaagcaggcggacggtaaaccggcgtaccacctgctgatggccttatccatcgattttcacctgcactatattaatgagctgaaagcgaagctgatctccgcggcgtcgataatcagcctgctgatcatcgccatcgtgctgtttgtggtctaccaggggcataagccgatccgccagatcagccgccagatccagaatattacctcgcgggatctcgatgtgcgccttgacccgcaggcggtgcctgtcgagctggagcggctggcgctgtcgtttaaccatatgctggagcgcatagaggatgtctttacccgccagtccaacttctccgccgatatcgcccatgaaatccgcacgccgattaccaacctggtgacgcaaaccgaaatcgccttaagccagagccgcagcccgcaggagctggaagaggtgttgtattccaatctcgaagagttctcgcggatgtcgcggatggttagcgatatgctgttccttgcccaggccgataacaaccagctgatccccgaacagcgggcgctggatttggccgatgaagtgcataaggtgtttgagttctttgaggcgtgggcggaagagaaagcggtggcgctgcgttttgtcggtagcccctgccgggtgacgggcgatccgctgatgctgcggcgggcaatcagcaacctgctgtcgaacgcgattcgctatacgccggccgggcaggcggtgaccatccagttgagcgaaagcgcggagacggtacgcctggtggtggagaaccccggtatgccgattgccgccgagcatctgccgcgcctgtttgaccgattctatcgcgtcgacccctcgcgccagcgcaaaggggagggcagcggcatcggcctggcgattgtgaaatcgattgtcggagcccaccacggcagcgtggcggcgcagtccgatctgcgctcgacgcggtttattgtgatgttgccgaaataggcgcaatccgcgagtgatagttgagtatgtggctttctgtcgctatattaaatgtacggaaaataaccgtacatgaagtttgcaccaggccggagataacgtatgcccgcacttaaaaagcagcgtatagatttgagattaaccgatgatgataagagcatcatcgaggaagctgcggcaatttcgaatcagacgattacccagtttgtggttgccagtgcctcagaacgtgctgcggaagtgattgagcagcaccgcagaatggtcctcaatgagcaagcatggagcctggtgatggaggcgattacccaaccgccagccccgaatgatcgactgaaacgtgcagcgaagcgtctacaaaccaggtaaggtagagctaatggagcagcaactgacgattgagatgattgccgatgcgttcagctacgatatcactggatttgattgcggcgaggaagcgctgaatacgtttttaaaagagcacctcaagcggcagcacgatggacaaatcttaaggggttatgcgctggtctccggggataccgttcccaggttgctgggttattacaccttatcggggagttgtttcgagcgaggcatgttgccgtctaaaactcagcaaaagaaaatcccgtatcaaaatgcgccaagcgtaaccctcgggcggctggccattgataaatctgttcaggggcagggctggggagagatgttggttgcccatgttatgcgagtggtgtggggagcgtctaaagccgttggcatctacggattgtttgttgaagcccttaatgagaaggctaaagcattctatcttcgtctggggtttatacagctcgtggatgaaaatagtaacttactgttttatccgaccaaatcgattgaacagctctttactgacgatgagtcataaaagaaaccgggcagcgccaggcggctgcccgcagtatcgcgactctcttactcttcgaagtaccagtagccctgattaatcagccgcgtcagttcgctcacgaacgccggattctgcaggccgctgccgagctcttcctggcctaatgaggtatagcgacacagcgcatccagcgcttcggcatcggtggtgtcgagttgttcgctatgcacgaaaaagctgtcgccaatatgcagaacgcgcaggccgctcaggcgggaaagcttttcaccacccagcagcgcatcgaccacttcctcttcttcatacggtggttctgccggcgcaatatccagctcgtgacgcggggtggtgacgaaactgccgaaccactgcttgaagtcttccggctggcgaatcatatcgatcatcatggtgcgcagacgttcgagttcatactcttcaacccggcccggatgctcgcggcaggtgaggtccggatcgctgtagtgctcgccgccgagatcgttctccagcacatagtcggcgaagctgctgatcaggtcgcggccgtttggcccgcggaagccgacggagtagttcagggcggtttcgtgggttatgccgtcgtgcgggaatcccggtggaatatagaggatgtcgcccggctgcagatcttcatcaatgatcggtgggaacggatcgacgtgcagcagtgccggatgcggacagaactgacgcatcggcagcttgtcacccacgcgccagcggcggctgcccatgccctgaataataaagacgtcatactgatcgatatgcgggccgacaccgccgccggggacggagaaggagatcatcaggtcgtccaggcgccagtccggcagtacgcggaacggacgcaccagctcggcggccggcatatgccagtggtttaccgcctgggccagcagggaccaaccggtttcgcccagcccgtcgaaatgttcaaaaggaccattgctggcctgccatttgccgtttttcaggctgaccagccggctgtcgacttccggctccatggctaatccggccagctcgtccggagtaatcgggtcgacgaagtccggaaacgcgttttttaataccaccggctgtttctgccagtatttttctaaaaactcgggccagttaatgttgagttgataagccatcgattattaccagtaagaagaaacgggcctgattatagaaatgagggccgggcgggcgcattgtcgtgggtcaagagtggtgcttaattcaccatcggcgcgataatggcgttgggtaagagagaaaaatcacattttcgccaaaaaccgatcttagcgtaaattgcgctgcaggccgcatgagcactgggattgcgcctttaatggtaagaagatgaattagcgaaaagttcaaataatgagcggtcgataagatttttctattttaacgcttgctacttccggcgaactccctataatgcgctcccactgacacggcagatgtgaatcacttcacacaaacagccggttcggttgcagagaaaaatcctgaaaaacgggttgactctgaaagaggaaagcgtaatatacgccacctcgcgacagagcgctaaagcgcgtcgcaactgctctttaacaatttatcagacaatctgtgtgggcactcaaagtgacatggattcttaacgtcctcggacgaaaaatgaataccaagtctcaagagtgaacacgtaattcattacgaagtttaattctttgagcatcaaacttaaattgaagagtttgatcatggctcagattgaacgctggcggcaggcctaacacatgcaagtcgagcggtagcacagagagcttgctctcgggtgacgagcggcggacgggtgagtaatgtctgggaaactgcctgatggagggggataactactggaaacggtagctaataccgcataacgtcgcaagaccaaagtgggggaccttcgggcctcatgccatcagatgtgcccagatgggattagctagtaggtggggtaacggctcacctaggcgacgatccctagctggtctgagaggatgaccagccacactggaactgagacacggtccagactcctacgggaggcagcagtggggaatattgcacaatgggcgcaagcctgatgcagccatgccgcgtgtgtgaagaaggccttcgggttgtaaagcactttcagcggggaggaaggcgttaaggttaataaccttggcgattgacgttacccgcagaagaagcaccggctaactccgtgccagcagccgcggtaatacggagggtgcaagcgttaatcggaattactgggcgtaaagcgcacgcaggcggtctgtcaagtcggatgtgaaatccccgggctcaacctgggaactgcattcgaaactggcaggctagagtcttgtagaggggggtagaattccaggtgtagcggtgaaatgcgtagagatctggaggaataccggtggcgaaggcggccccctggacaaagactgacgctcaggtgcgaaagcgtggggagcaaacaggattagataccctggtagtccacgccgtaaacgatgtcgatttggaggttgtgcccttgaggcgtggcttccggagctaacgcgttaaatcgaccgcctggggagtacggccgcaaggttaaaactcaaatgaattgacgggggcccgcacaagcggtggagcatgtggtttaattcgatgcaacgcgaagaaccttacctggtcttgacatccacagaactttccagagatggattggtgccttcgggaactgtgagacaggtgctgcatggctgtcgtcagctcgtgttgtgaaatgttgggttaagtcccgcaacgagcgcaacccttatcctttgttgccagcggttaggccgggaactcaaaggagactgccagtgataaactggaggaaggtggggatgacgtcaagtcatcatggcccttacgaccagggctacacacgtgctacaatggcatatacaaagagaagcgacctcgcgagagcaagcggacctcataaagtatgtcgtagtccggattggagtctgcaactcgactccatgaagtcggaatcgctagtaatcgtagatcagaatgctacggtgaatacgttcccgggccttgtacacaccgcccgtcacaccatgggagtgggttgcaaaagaagtaggtagcttaaccttcgggagggcgcttaccactttgtgattcatgactggggtgaagtcgtaacaaggtaaccgtaggggaacctgcggttggatcacctccttaccttaaagaacctgcctttgtagtgctcacacagattgtctgatgaacgtaaagaagcaaggcgtcttgcgattgagacttcagtgtccccttcgtctagaggcccaggacaccgccctttcacggcggtaacaggggttcgaatcccctaggggacgccacttgctggttcgtgagtgaaagacgcgtgccgatgtatctcaaaactcatcttcgggtgatgtttgagatatttgctctttaaaaatctggatcaagctgaaaattgaaacgacacacagttaatgtgtgttcgagtctctcaaattttcgcaatcagaagtgaaacatcttcgggttgtgaggttaagcgactaagcgtacacggtggatgccctggcagtcagaggcgatgaaggacgtgctaatctgcgaaaagcgtcggtaaggtgatatgaaccgttataaccggcgatgtccgaatggggaaacccagtgcaattcgttgcactatcgttaactgaatacataggttaacgaggcgaaccgggggaactgaaacatctaagtaccccgaggaaaagaaatcaaccgagattcccccagtagcggcgagcgaacggggagcagcccagagtctgaatcagcttgtgtgttagtggaacggtctggaaagtccgacggtacagggtgatagtcccgtacaccaaaatgcacaggctgtgaactcgaagagtagggcgggacacgtggtatcctgtctgaatatggggggaccatcctccaaggctaaatactcctgactgaccgatagtgaaccagtaccgtgagggaaaggcgaaaagaaccccggcgaggggagtgaaaaagaacctgaaaccgtgtacgtacaagcagtgggagcaccttcgggtgtgactgcgtaccttttgtataatgggtcagcgacttatattctgtagcaaggttaaccgtataggggagccgcagggaaaccgagtcttaactgggcgttaagttgcagggtatagacccgaaacccggtgatctagccatgggcaggttgaaggttgggtaacactaactggaggaccgaaccgactaatgttgaaaaattagcggatgacttgtggctgggggtgaaaggccaatcaaaccgggagatagctggttctccccgaaagctatttaggtagcgcctcgtgaactcatcttcgggggtagagcactgtttcggctagggggtcatcccgacttaccaacccgatgcaaactacgaataccgaagaatgttatcacgggagacacacggcgggtgctaacgtccgtcgtgaagagggaaacaacccagaccgccagctaaggtcccaaagtcatggttaagtgggaaacgatgtgggaaggcacagacagccaggatgttggcttagaagcagccatcatttaaagaaagcgtaatagctcactggtcgagtcggcctgcgcggaagatgtaacggggctaaaccatgcaccgaagctgcggcagcgacactatgtgttgttgggtaggggagcgttctgtaagcctgcgaaggtgtgctgtgaggcatgctggaggtatcagaagtgcgaatgctgacataagtaacgataaagcgggtgaaaagcccgctcgccggaagaccaagggttcctgtccaacgttaatcggggcagggtgagtcgacccctaaggcgaggccgaaaggcgtagtcgatgggaaacaggttaatattcctgtacttggtgttactgcgaaggggggacggagaaggctatgttagccgggcgacggttgtcccggtttaagcatgtaggctggttgtccaggcaaatccggataatcaaggctgaggtgtgatgacgaggcactacggtgctgaagtaacaaatgccctgcttccaggaaaagcctctaagcatcaggtaacatcaaatcgtaccccaaaccgacacaggtggtcaggtagagaataccaaggcgcttgagagaactcgggtgaaggaactaggcaaaatggtgccgtaacttcgggagaaggcacgctggtgtgtaggtgaagtccctgcggatggagctgagaccagtcgaagataccagctggctgcaactgtttattaaaaacacagcactgtgcaaacacgaaagtggacgtatacggtgtgacgcctgcccggtgccggaaggttaattgatggggttatccgtaaggagaagctcttgatcgaagccccggtaaacggcggccgtaactataacggtcctaaggtagcgaaattccttgtcgggtaagttccgacctgcacgaatggcgtaatgatggccaggctgtctccacccgagactcagtgaaattgaactcgctgtgaagatgcagtgtacccgcggcaagacggaaagaccccgtgaacctttactatagcttgacactgaacattgagccttgatgtgtaggataggtgggaggctttgaagcgtggacgccagtctgcgtggagccaaccttgaaataccaccctttaatgtttgatgttctaacgttggccccttaccggggttgcggacagtgtctggtgggtagtttgactggggcggtctcctcccaaagcgtaacggaggagcacgaaggttagctaatcctggtcggacatcaggaggttagtgcaatggcataagctagcttgactgcgagcgtgacggcgcgagcaggtgcgaaagcaggtcatagtgatccggtggttctgaatggaagggccatcgctcaacggataaaaggtactccggggataacaggctgataccgcccaagagttcatatcgacggcggtgtttggcacctcgatgtcggctcatcacatcctggggctgaagtaggtcccaagggtatggctgttcgccatttaaagtggtacgcgagctgggtttagaacgtcgtgagacagttcggtccctatctgccgtgggcgctggagaattgaggggggctgctcctagtacgagaggaccggagtggacgcatcactggtgttcgggttgtcatgccaatggcactgcccggtagctaaatgcggaagagataagtgctgaaagcatctaagcacgaaacttgccccgagatgagttctccctgagactttaagtctcctgaaggaacgttaaagacgatgacgttgataggccgggtgtgtaagcgcagcgatgcgttgagctaaccggtactaatgaaccgtgaggcttaaccttacaacgccgaagatgttttggcgatttgagagaattttcagcttagattcagagttgagtacgcaataatttgcgcagcagcaaggcgacaagcgacggaaaggaaggagcatactgaagtatgtgactgactttacgagcgcaggcaacgcagctgatgcgataaagaattgcgtactgagcacaaagaatttgcctggcggcactagcgcggtggtcccacctgaccccatgccgaactcagaagtgaaacgccgtagcgccgatggtagtgtggggtctccccatgtgagagtagggaactgccaggcatcaaacaagtgaagagcccatcctgtcggatgggctttttgcgtttctgtcgtccggccagcgtgccggtatgtctccccggtggcgctgcgcttaccggggctacggatccgacacggggctacgtccctgtggccggacaaagtgcgcagcaccgcctttattgcttcgcaaaatagcgtgacgaatgcttgtggcatggtcaaccggatagtgaatttaccggatgatacaagtcggaaaataattatcagcagctacgattaatattatttctttatttcagcgccattatattgtgccccggtaaaataatgatgcggcctcttcctcccacaaaataacgcgtttacgcttcagaaaaaatatttccgtgactggatacttcgcttccggatgtattgtggcgaacggtatgcttcttccctgtttttgtctaaatgagctttatcattaacactttgttaacttgatctggtttatatggcagcaaatttgatatacaaagggggatgattgcctgtatggatgctgcccgaaataccttgcgaaacatagactggttctcggctggcaaatgagaatagaaatgaaaatcctgcttaactggtcgccattgcgccagctcttcacttacattcaggagcgctttacctttctggtgctgctctgctggccagcgattatctggttgttctgtcgggtcggcgtgtggctcaccgataacgtttatgaactgctgggaaaatcacccgcccagtccttcactgtgtatctgcagccgtttatgacccccggcacgctgctacgcatctccatcagctgggtggtgttgctgttcattctcttcagtatggcgatggccttcacctggggtttacgtcgctttatgaatcgccataaataaaccattcggccgccgtaagtcgacggcccttcttaagcctttatgccatctcaccgatagtcttacgaaaacgcagcaacgcgatagtaaagaacactccgccgatagccagcaaggttaagaactgcggccagacgatggcgaagctggcgcctcgatacaatatcgcctgcgccaggctgacgaagtgggtggtcggcatggtcaacataatatcctgtaccagctgcggcatactttctcgcggcgtggatccgccggagagcatctgcagcggcagtaagaccaggatcatcagcagccccagctgcggcatcgagcgggcgagggtgcccataaaaatgccgatcgaggtagtggcgaacaggctgagcgccacccccagcataaacagggtaatcgacccttcaatgggcacctgcaaaatcccctgtaccatcagtatcagtgacaacccggacaccaccagcaccaccaggcccatcgaccagatcttggccatcatgatttcaaacggcgtgaccggcatcaccagcagatgctcaatggtgccatgttctcgctcgcggatcagcgccgaaccggtgaggacaatggccagcatggtgatattgttgatgatcgccatcaccgcgccaaagcgctcctgctcaaggttaggattaaaacgcatccttaccgccagctctaccggcagcacgctgttatcccgatagcgggcgataaaactgtttacttcgccggtgataatattctggatgtaaccgttgccggtaaaggcctggctcatgcgcgtggcgtcgacattgacctggatttccggctgccgaccggccagtacatcgcgctggaagttaggcgggatgttgatggcgaacgtgtagcgcccggcatccagcccggcatccatctcatcagcggtgatcagctccggctcaagaaaccagggacggtagaaagcgttaatgatgcgtgaagagagctgggatttatccatatcagcaaccgcgatcggcgccaggtgcagcgaaccgggcatcaccgtggccgaggagtacaccgacacggtaaacgcaaacacgatcagcgccagcatcgctttatcaccgagcaggctgcgcagctctttgacgccaagattataaatattgcgtaatccgcgcatcatccctcctgtttctgcagcagcagcacgctcaacccgagcaccagcggcaccgcaatcagtagcggaatgaatgagccccacaaatcgctaatattcagcgctttcgaaaaggtcccgcgggcgatagtcaggaagtggctggtcgggtagatttgcccaatccagcgcccgggaccttccagcgaggccaccggatcgatcattccggaaaactgggttgccgggatcagcgtaataatcgcggtaccgaaaatagcggcgatttggctcttcataaaggttgagatcagcagccccagaccagtggcgatggtgacatacagcagcgccgccagggtcagcgtcaggaaactccccttatgcgcgacgccaaagacaaagaccgacagcgcgcacagcaggaagaagttaaacatccccagtacgatataaggcagctgtttgccgagcaggaactcgctacgggtggtcggcgtcacgtacaagttgataatcgacccgagctctttttcacgcactacgctcagggcgctgagcatcgccgggatcatcatcagcagcagcgggatcaccgccgggacgatggccggcaggctcttcacatctggattgtagcgatagcgggtctcgatggagatgagcgaggtatcgcgctgcgggctgctctgccggccggccatctcctgcagccaggccagatgcatcgcctgtatgtagccgcgcacggtttccgcgcggttgggcatcgcgccgtccacccacacgccgatttgcaccggcgtgccgcgggcgatatcgcggccaaagttcggcgggatctctatcgccaccgccagctcgccgtcgcgcatccggcggtccagttcgtcatagctgcgcagcggcgcctgttcgataaagtagcgtgagccagcgagattctgcgaccagccctggctgctgagggtttgatcgcggtcgaggacggcaaagcgcagatcctcaacgtccatgctgatcccataccccatgataaacatcaggatcaccgtccccagcagcgccagcgtcgatcgtaccggatcgcggcgcagctccagcgcctcgcggcggctatagctaaacagccggcgaagactgaaggcctgccgtggagtcgtatgtccggaatgcgatgccacagcagacgtgggttcttctggtactggagaggacggctgggcctctttaagccaggcgataaacgcctcttccaggctgtttgaaccgcgctgctcgaccagcgcctgcggcgtatcgctggccagcactttgccggcgtgcatcagggagatacgatcgcagcgttccgcctcattcataaagtgggtggagataaaaatggtcacctgatcctgccgcgcgaggtctaccatcagctgccagaacatatcccgcgccaccgggtcgacgccggaggtcggctcgtcgaggatcagcatctccgggcgatggatgaccgccaccgctaacgacaggcgctgacggatccccagcggcagatcggcgggaagcgcgtcttcaacctcggtcagcataaagcgctcgcacatttccgccacccggccggggatttcgccgtccggaatatggaacaggcgggcgtgcagctcgaggttttgccggacggtcagctcgctatagagcgagaaggcctgcgacatatagcccacccgctggcgggtggcgatatccttcgggtcgaccggctggccgaacagccaggcttcaccttcgctggcgggcagcaggccggtgagcatcttcatggtggtggatttgccgcagccgttggagccgaggaagccgaagatttcaccgcgggcgatgcggaaattaacgtggtcgacggcaacaaagttgccaaagcgcatggtcaggccgcgcgcttcgatggcgatctcttcctcacggctgtcgcgcggtgggataactaccgccctatgcgcctgacgctgtgcttctggcagcagggcgataaacgcctgctccagggtctggctgccggtctgggctttgagctctgcggcgctgccggtcgccagcacctcgccggcgttcatcgccaccagccagtcaaagcgctcggcctcttccatgtaggcggtggccaccagcacgctcatcgccggctggcgctggcgaatactgtcgataagctcccagaactgcgcccgggagaggggatcgacgccggtggtcggttcatcaaggatcagcaactgcggatcgtggatcagcgcgcagcacaggccgagcttttgcttcatcccaccggagagtttaccggcggggcgatcgcgaaacggcgccagcccggtactctgcagcagctcgttgatgcgcagttcgcgttcggctttatcgtggccgaacaggcgggcgaagaagtcgacgttttcatacaccgagagagtgtgatagaggtttttccccagcccctgcggcatccacgcgattttcggacacacctcgcggcggtgatgcacatcgcgcatatcgccgccaagcaccatcacgttcccctgctcgatggtccgcgccccggcgatcagcgaaagcaggctcgatttgccgacgccgtccgggccaatcaggccaaccatacgccgtgccgggatcgccagactgatatcgcgcagcgcgatggtggcgccaaactgctgaccaacgtgttccagcagggcgacggggggcgaggtatcctgcggcgttagtttcattgcggcaacctcaccgccagggcttcaggccagggttgttgtttatccagccgtacgtaagccataccgggcaggccggttttgacatactccaggtgctgcgccagcagctccggcgggatacgcgctttgacgcggaacattagcttcaggcgctcgtcgctggtctcgaccgttttcggcgtgaactgggcgacgctggcgacaaagctgatattggccgggatcaccagatccggcgcggcatcaaggaccaagcgcgcttcgctgccgagcgccagcagacctgcctgttcggtgggcagaaaaaaggtcatatagacatcggcgagatcgaccatgttcagtacccggccaccggcggccaggacttcgcctggctcagcgacgcgatactgaatgcggccgtcgcggggggctttcagctcgctatcgtcaatatcggcgaggatccgccgctcggtcgcctgggaggcttcgacgcgggtttgcgcctgaataatgctggtgcgggcagcttcgatggcggcgcgggcggcggagacctgggctttcgccgattccagcgccgcgcgggcgctctctgcggccgcgcgatcgtcatccagctgctgggcagagacggcgccacgctgggagagggtgttggagcgaacatggcgtttcgccgtggaatccagctccgcctggcgctgcttcactaccgcttcgctggcgcgcatttcactttgtcgctgatcgagcaaggctctggcggccaggaccgcgctttccgcctccttgatttgcgcggcggcttcaagacgctgctcgttcagtacccgggtatccattctcgccagcacctctccctggtgcacgaactgaccctctttgaccagaatggtgtcgatacgcccggcgattttactggcaatatcgacttcggtggcttcgattcggccgttgctgctggcaaaccccgccgggagtcccggcgggcgcagcagccaccatgcggcggcggcgagcaccaccagtaagccgacaaaataccctgcccaacgtttctttattttgtccatacgcgactcgcttgattccctgtgctgagtggtgcgcgtgtttcctccggcgggcggagcgtccttcttgcgaaggacgaaaaagtggagggagggccgctgacgccgcgctctgccgcgccgatgcgcagccgctcgctgggctacttatgtgatcatcatcagagatcctggccttaatgaaacacgcatagtgagagctaccgttaacgcgatagtaacagccggggcgatattgtccatacgaaatacagggtcttgtcggcgtgttaacaaaattatccgcacagggagtatttcaccatctcagaacagcaccggcagccccagcccgcgcttcacctcatgcagcgtctgctgcgtcagctggtgggcgcgttcgctgccctggcgcagcagctccagcagcatccctttatcctgaataaaagtggccctgcgttcgcggatcggcgccagtagcgtctgcaagcaggtctccagctcattcttacactggcgatcgcccagcccgccgcgctgatagtgggctttcatctctgccacccgcgccttatcgctgtggaatgcatcgagataggtaaacaccacgttgccctcgacacgccccggatcgctgactctcaggtgcgtcgggtcggtatacatcgcgctgaccgcgtggtggatctcctcctctgtggccgataacgtcagcgtattgcccagcgatttcgacattttggcgttgccatcgacgcccggcaggcggctcacttcgctgagtagcgccttacagtggcgcagcaccggctcgccggtgaggctattcatcttgtggacgatctcgttggtctgctcaatcatcggtagctgatcgtcgcccaccggcaccagctcggctttgaaggcggtgatatcggccgcctggctaatcggataggcgagaaaacccaccggcagcgagcgggcgaatcccttctgggcaatctcatttttgaccgtcggattacgttctacgcgggcgacggtgacgatattcatatacagcgcgctgagctccgccagcgccggcagggcggactgcaggcaaatagtggtgagcctggtgtcgatgccgacggccagataatcggccatgacttcgaggatatggtggctgattttttgcggattgctgccgttgtccgtgagcccttgcaggtcggcgatcaggataaattgctggtggttatgctgcagcgcgacgcgctggcgtagcgagccgacgtagtggccaagatgaagttggccggtcgggcggtcgccggtgaggatggtttgtggatggttcatcagggactccttatcagactgttcagccgaaagacgtcctgaaaacaccaaagccgccttccggcggctttgaaaatggaaacgtgtatcgtgccgcctgttatgcaggcagccaccaacggcggggataggtaacgataacgtttctgttcatagggagtatcctgccacggaaggggctggaggcgcaatcaaaaatcacatacttttcctgatgttatttatgtgattgtttttcggtaaataacgaagcgagaaaaatatattttctctgcgacccgaacattattctggaacaacaaactatgttgcattttttttgtgaaaaagctcacgccacaggattatagtattattatccatatttatagctggatattacctgtctgctgttacagcttgtgtttattctcttctaaattattaacattattacaatttctatctatttttccgctttgcgtcatacccctgtctgactacaacgtattgaggctaattattatgcataaacgtctggtcgttaatattttttcatccttgctgttgggggctgcgcttatttccgcgccggtatatgcggcggaaaaaaccgtagtcaatatttcaaaagtggacggcatgccatggtttaaccggatgggtgaaggggtagtccaggccgggaaagagtttaacctcaacgcctcccaggtagggccgtccagcaccgatgcgccgcagcaggtgaaaattattgaggacctgattgcacgtaaagtggatgccatcactatcgtgcctaacgatgccaacgtgctggagccggtattcaaaaaagcccgtgacgccggcatcgtggtactgaccaacgaatcgcccgggcagccgagcgccaactgggatgtggagataatcgataacgagaagttcgctgctgaatacgtggagcatatggccaagcggatgggtggcaaaggcggctacgttatctatgtcggtagccttacggtaccgcagcacaacctgtgggccgatctgctggtgaaataccaaaaagaacattacccggacatgcatgaagtcacccgccgaatgccggtggcggaaagtgttgatgattcccgccgtaccacgctcgatctgatgaaaacttacccggatctgaaagcggtggtctcttttggttcgaatggcccgattggcgcggggcgcgcggtgaaagagaagcgtgcgaaaaataaagtcgcggtctacgggatgatgatcccctcgcaggcggcctctcttattaagagcggcgatattaccgaagggatcacctacgatccggcgacagccggctatgccctcgcggccgtcgccagcaccctgctgaacggcaaaaccattgagccgggatttgaactgaaagagctcggtaaagcggaggtcgatagcgacaagcatattatccgcttccataaagtgctgctggtaaataaagacaatattgattcgctctactaatccaccttccggggcgccagccgccccggcttaaccagccaggggatgctatggaacctttcctttcccttcgacacgtcagcaaaaccttccacgccaaccgcgcgctcaatgatatcagcatcgactttatgcccggagaagtgcactgcctggccgggcagaacggttgcgggaagtcgacgttgatcaaaattatctctggcgtctatcgcccggatgagggcgcagcgatgacgctgggcggcaagacgtggcccaaactgacgccagcggcctctgtcgcccatgggatccaggtgatttatcaggatctgtcgctgtttcccaatctcagcgtgtgggagaacattgctataaaccactatcatcgcggcgtgctggtgaggcgcagcgaactgcgacgcagtgcggagcaggcgatgcgcagtattaacgtctcgctgccgctggatgccgccgtggaatcgctctccatcgctcgctgtcagctggtggctatctgccgcgcgctggcgcaggatgcccggcttatcattatggatgaacccacggcctcattgacccatcaggaagtggagggactattgcatgtggtgcgccagctgcgtgagagggggatctgcatcgtcttcgtaagccaccgtctggaagaggtcatggccgtatcggaccgcatcagcgtgctgaaggatggcaatctggtcggcaccttgccggcggcagaggtaaccacccgccggctcggttttctgatgacgggccaggagtttgactatcaggtgcgcgatctgtggcaggggcagggcagtacgccggtgctggaggtgcgcaatctcagccgcaagggggaatatcataacgtctccctgaaggtcgaagccggagaagtagtgtcgatagtcggcctgttgggcgccgggcgaacagagctgtgcctgagccttttcggcatgacccgccctgacagcggcgagatcctgataaatggccacccggtgcggttgcgtagcaatcaggacgctatccgccacggtatcggctatgtctccgaggaccgtatgtcgcgcggcctggtgatgagtcagtcgattgaaaacaacattatcagcaccgtgtttcataaagtgaaaggcgcttgcggactattgagtgatagtaaagctcagcagctggtcgcaagaatggtcaacgcgttgaccattaaggcgccggatacgcatctgccggtgaataccctctccggtggtaatgcccagcgcgtttctatcgccaaatggctggcgatctctcctaagctgctgctcctcgatagcccaaccgtgggggtggatatcgcaaacaaagccgggatctatcatatcatcagcgatttggctgcccatggtatcgccgtgctgatgatttgcgacgagattgaagaggcgtggtaccagagtcatcgcatcctggtgatgaagcagggcgagttgacccatagcttcctgccggacagcagtacccagcagcagatagcggaggtggtcaatggctaatctgttgaaacgacatgaattctggttaggcatgttcattattgcgctgtgcctgctgctgggctggcgcagtgaggaatttttcactttcggcaatatttacgacctcgctaataactatgcgatgctgaccattctcgcctgtggtctgttcgtggtgctgatcgccggcgggattgatatctccttcccggctatgaccattatcgcccagtacggcatggtggtgatgctgcaaaaagtaggcggcaacttcgcggtggcttttgtgcttgccggcggcatcggcgtgctgctggggctggtgaacgcgctgttggttaatcgtctgcgggtgccctcgatcattatcaccatttctacgctcaacattttctacggtttgctgctgtggttaagcaaaggtgtctggctctacgacttccctccgtggtttgaaaagggggttatgctgttcaaatataccgatgccgatggttacgattacggcctggggctgccgctgctgacgatgatcgtcgtggtgctgttgaccgcgtttatcatgaatttcaccaccgttggccgcaagatctatgccatggggggcaaccgggaatccgccagccgcgtcggcttcagcgtgctccgcctgcagctgttcgtttatggctatatggggctaatgtcgggggccgcaggtgtcgtgcaggcgtggacagtgatgaccgttgcgccggattcactgctgggctatgagctgacggtgctggcggcggtggtgctgggcggcaccagcctgattggcgggcgcggaactctcaccggtacgctgctgggggtgattttactggcggtgatgcagaacggcctgaacctgctaggggtctcctcctactggcagaccctgatcactggggcgatcatcgtcgtcagcatcagcgtaacggcatggagccagcatcagaaccggagcttgttatgaaaaaatcgtggcgcaacaacgttgagttttacctgatcggcctgctgctgctgatggttatcgcctttagcatcgccatgccaaacatcttctggtctgtcagcaatttccagtcgattgcctcgcaaatgccggtgctggggatcctggcgctggcgatggccatgactatgctttgcggcggcattaatttgtcaattatcgcgacggctaacgcctgctcgctggtgatggcctgggtggcgacgagctatccgcctgggggcgctaccgcgctggcgacgctgctggctggcggaggggcggcgatgatcattggcctgtgcaacgggatattgatcgccgggatccgcgtttcgccgatcctggctacccttggcatgatgaccctgctcaaagggataaatattctgatcaccggcggcagcgccatcgctaactatccgcagtgggtgctgtggctgaatcacgcccagtggttcggtattccgctgccaatgtggctttttgcggtggtggcggccgggctgtgggtgctgctggagaaaagcccgctgggtcgggcgatcatgttgatcggatccaacgaacgggcgacccattattccgggatcaatacccggcgggtgttgatgtgggtatatgtcatctcggccctgctctgcgcggtggctgcgtttctgatgatgtcgaagctgaactcagccaaagcatcttatggggaatcgtatttgctggtgtcgatcctcgcggcggtgcttggcggcgtgaatccggatggcggtagtgggcgcatcgttgggatggtgctcgcgctgttcctgctgcagattattgagagtgggttcaatatcctcggtatcagcccctatctgacgatggcgctgtggggcgtattgctgctgtgctttatccaggcgcgaggcatgctgggactggagagagccgggtaaatgacccgtcctcgggggtgaagacgggatagccagttattcgctacgcaaatgcaccgccaggccgctttgccctggcgccagctccgggcgcagcgtcagcgacgggatcagataatcgccatgattctgccggcggaatggaatgggctcggtttgccacagcgtgtccagccgctcggccagggcggcgcactgatcggcgaactgcccggcatcggttttatccgtgcggtagaacaccagcggcggaagcacctcaaagccggggtagaacagcataccgtgctgaatggggaacaggatgtcgtcgatggggccattgatcccgcgtggtgaatagtgttccgcccagccgccggcggtgacgatcagcatcgcccgcttgccgacgaaagtgccttccccgtagcgatcgccccagtggcggtcgctgtgctccccgacgccataggcaaagccccaggcgtacaccctgtcgatccagcccttcatgatggcgggcatcgagaaccaccatagcgggaactggaaaatcaccgtatcggcccacagcagcttttcctgctcggctacgatatccgcactttgggtgccctgggcaaaggcctgtttggaatcgagggtcggccgccagaactcgccgaccggcggcgcgccgctgtcgtctgcgtcatacccggccttccagcgcatggcatagagatcggaaacctgcacttcatgcccggcctgctgcagatggcggatggcgaaatttttcagcgcgccattgagcgagcgcggttccggatgggcgtaaatcagcagtactttcataatatcacctctggcgtatggagagctgcagagtaggaaagctgacgctatagtagaaattaattacttaaattcccggtatagtcgtgattaatttacagcgtctggatctcaatctgttgcgcaccctggatgtgctgcttagcgaaaacaacgttacccgggcggcgcagcggctgaatctgtcgcagccctcggtgagtattcagctcgccaggctgcgggagattttcgccgatccgctgctgatgccgggcccgcgcggcatgcagcccaccgcccgcgccgatgagcttcgtcagccgttgcgcgctgcgttagccgcgctggagcaggcggtggcgccggtcagcccttttgatccggccacggcggcggagacctggcgggtggcggcgacggactatatggcctcggcgatcctcctgccgatgctggctgggttacgccaggcctctcccggcagtcggctggcggtattcgaactgcagccggcgcggctggagcagcaggcggccagcgatacagtagatcttttctttcatacccgcgagggcgcgccgccggggctgcatcagcgcctgctgtttcgcgaacgctacgtgctggctggccgggcggaacattcggcgctgcggcctgggcttagcctggaaacgttctgtcagctggagcacgtgatcgtctccccggacgggggcggcttcagcgcggcgaccgatatcgcgctggcgaacctcggactgatgcggcgggttgtcctttccgtgccacatttcctgtttatgctggagaccctgcgcaatagcgatctggtggcggtcctgccggagcggctggtgcgcgggcagagcgggctggtggtcgtcgagccgccgctggcggtcgccggctttgagatgctgatgctgtggcacgagcgctggcaccgcgacccggcgcatcaatggctgcgtcagttcattgtgaattcactggaggaacagacatgctgagtggactgaatcacctgaccctggcagtcagccagctggcgccgagcgtggcgttttatcagcagctgctgggcatgacgctgcatgcccgctgggacagcggggcttatctctcctgcggcgatctgtggctgtgcctgtcgctggatccgcagcggcgcgttactccgccggaagagagcgactacacccattatgcgtttagtattagcgaagccgattttgctagcttcgccgcccgccttgaggctgccggcgtggcgatctggaagctgaaccgtagcgaaggtgcctcgcactatttcctcgatcccgatggccataagctggagctgcacgtcggcagtctcgcccagcgtctggccgcctgccgcgaacagccgtataaggggatggtgttttttgatcagtgaagctgcttcgcagacgctagatcacccgtagccccggtaagcgcagcgccaccggggagaacaggttaaattcactccatcgccaccttcaccgcttctcccagcttcaccatcaccgctttatgtttctcggtcggcggcagggcgcagttgatcctgacgcagttgcgatacttgcccgctgccgaaaacagcgagcccggcgcgacctggatcttcagccggcacagctgcttggcgacgcagaccatatctacctgctccgggagctcaacccacagcataaaaccgcccttcggccgggtgacgcagatcccgcaggggaaaaattcccgcagccagcaggtgtagatctcgatattgcgctgatagatctgccgcatccgccgcacgtggcggtggtagtggccttcgcgaataaaattacaggccgccagctgagtggaagggacgttggtcccgctggcggcgtacttcatctgtagcagcttgtcgtagtagcgcccgggggcgatccagccgatacgcagcccgggggcgatggttttggtaaaggagctgcagagcatcacccggccgtcgatatcccaggagtggatcgtgcgcgggcgcgggtattcggtggccagctcgccgtaaatatcatcctcgaaaataacgatatcgtagcgttgggcaaggttcagcaccgcgcgcttgcgggcgtccggcatgataaagcccagcgggttattgcagtttggcacgaggatcacccctttgatcggccactgatccagcgccagctccagggcctcgatgctgatcccggtttccggatcggtggggatctcaatggtctttaatcccagcccgcgcagcatctgcatggtgccgtagtagcagggggattccacggcgatgatgtcccctggctggcacaccgacagcagggccagcgacagcgcgctgtggcagccgctggtgagcaccagatcgtcggcagttaccaccgatccgccgtcgagcatcaggcgggcgatctgctcccgtagctcgcgacgcccggccagctcgtcatagttcaacacctcagtgaggttgtgctggatagcccggctcagttcacgccagatgggcttcaggcttggctgcgtcacgtccggcgagccacccccaaaggggatgatcgatttatcgtagcgggcgtcaagcatggtcagcacctgatcccactgggtgatctccaccgggcgctggaccggacgcgacatcggcggcaccggcggctgggctttgcgcggggcgacgaaatagcccgatcgcggctgcggcacaatcatctgctgctgctcaagcagctgataggcctgctggacggtgctgatgctgacgccgtgctcctggctcaggctgcgcaccgacggcagcttttcgccatggcgatacaggccctgttcgatgcgttcggccagcagcgtagcgagatgttggtagcgggtcatgctgtatccttaattgccgccatacagatggaataaccagtacagatgggcgtaaaaattgggctctggtgtacgttttagctaatctgtatgttaaagaaaagcgttttgtgaatctgtattccttacccccaaatccgtgaagataaagcctctggcaaggtgaggaggtagaggatggaatttcacgagaacagggcaagacagccatttatcggtttcgtactgctggtgcggtttatcaaaaaatggtggcttcaggagcaaacgcgcagagttttgcagcaaatgagcgacgaacagctgaaagatatcggcctgcgtcgggaccagatcaattaaaacgtgcggttttttacaggcaaaccttcttcattatcccggtgagcgcaaagtgccgccgggatacattcacgaaatttatcaattgatgcggcacgagcttccgtttcttgatacttaccctgataagtattattttcttctcaataatgagaggaagacccgtgactgaagacgaactgtttgcccgccgcccgctggggatgcggatggctatggtggtgcgccagtggcgcgccattattgactccgctatcaccgataccggactcacccagtccagctggacggtgctgatgcaactgcatcagctgggagacaacgtctcggtcagcgaactggcggaggtgcagggcattgaactgccgccgctaatgcgcaccctctcattactggaaaagcagggctatctggtgcgttccacatcgccatatgacaaacgcattcgcctgctgacgctgaccgctgaggggcgggctattctggaaaaactgagctgcgtgatcgagacctatcaggagcgcgtaacccagaccatcccggaggccgatctcgccaccttcagcgccacgttaaatcaaatcgcctgccgtttgcggaatatccgcgaagaagataacaagatctaacacactatgatgacgcctgaacaaaaatttgcccgctgggtacgggtgagtattgccgcttttctgggaatattcgcctggtttatcgttgccgatatctggatcccgctgacgccggactccaccgtcatgcgcgtggtgaccccggtttcgtcgcgggtctccggctatgtctcgcacgtctacgtgcacaacaacagccaggtgaaaaagggcgacctgctgtatgagctcgacccaacgccattcattaataaagttgaagcggcgcagatcgccctcgagcaggcgaaactgagcaaccagcagctggacgcgcaaatcgccgccgcccgcgccaacctgcgcaccgcgcagtacaccgcgcgtaacgataaggtcaccctcgatcgctaccagcgcttgagtacgatgcagaacgtctcgcagtccgacctcgataaggtgcgaaccacctggcagaccagcgagcagtcggtctcggcgctgaacgcgcagatccagaacctgctgatccagcgcggcgagcgcgacgataagcgcaacgtcaccctgcaaaaataccgtaatgcgctggaggaggcgcagctgaacctggcctggaccaaagtgcgtgcggaaactgacggcatggtcagcaacctgcagctgaacccggggatctacgccaccgcggcgacggctgtgctggcattggttaacaacaacactgacatcgtcgccgacttccgcgaaaaaagcctgcgccacaccgcggtgaataccgatgcggcggtggtctttgacgccctgccgggtcaagtcttcccggcgcacgtgaccagcagcgacgccgggattctggcgggacaggaggcggtgaacggccagctgtcgcagcccgagcagtccacccgctgggtgcgcgacgcccagcggatgcgcattcacgtcgcgctggatcagccgctggacaaaccgctgccgaccggcgcccgcgctacggtgcagctgtacaatagcgagggaccttttgcccgcaccttcgccggcctgcagatccacctggtgagctggttgcactatgtctattaataccctggcgcatgtctttaccccgcacggcaatatcgtctacacggcgaatgattttcgccagacggtgcgtatcgccgtggccgggaccattgcgctcagcatctccaccttctacgacgtgcagtacggcgtatttttcgtcgtttatccgctgatgctgatgtcgctggtgccgatgttcaacctgcacgtcgcccgccagtttatatttagcgcggcggtaaactgtgtcgaaatggtgctaattgtcggctatttgtcgcagtggccggtgatcatgaccctggtggtgtttgccctgtacgtgatgcgtttccgctttatgagccagggaccgctgttcctgttgggatcgatgggggtggtgtgccagagcacgatgctcaattttatgagctatcccaccagcaactggcacaccctgatgttctccaatatggaagcctgcgtgatggccgtggcgctgagcgcgctgctgcattacctgatcccggacgtcgaaccgcgcaagccgccgccgcggattgagaaagacgccgcccgcatccgtcatgagtcgctgctctccggtacggtagcgacgatcatctttgtggtgtttcagatctgcgatctcagcgactcgctgtcggcgctgatggccgggatcctgatcctgttcccgatgcactatcgcggggcggtgatcagctcgatctggcgcgtcgtcggggtggtgctggcctgtctctatatactggtggtgcagctgattatctatgatttcagcaaccacatgatcctgatgatgccgctgattggtctcgggctggccttcagcgcccgcctccacgtgatggagaaagtgggcgccggggtgggcttcgccagcatcactaccatcggcattatgttcggccagaacctgcatccgtatcaggatctggtgttcagcgatctgtaccgcatcacctcggtgacggtctcgctggtggtgacgctgaccctggtttttctcatgcaccgcctgctgaactgtttcgcggcgacgcgttttgtggtgagcgattaacctgccggtgggaaggtggcgagacagcgccatgcttccccgttctgctgatacagcgccgccgtctgttccgggacgatccagcctcgcgcatcggcttccgtcccctccagcaggatgcacagcccgcagccgctgcgcagctggcggggtatatctttgacctcgaaggccactcccgccgcctgcatggctttgcgcatccgcaccacccccaccgtggagtgaaataaaaacagaaacgttgtcatccgcgcctccgctggcgctgtccgatcagcgccgcgccgatcgccccggcaaactgggcgtcgggatgggttgtcaccgccatgccgacatggctttccagcatccgggcaaaggcggcgcagtggctgacgccgccggtaaacagcagcggcccctgcgccgataagcggccgataaagttcgcgctgcgccgggccatggcgttaatcaccccggccagaatcgcctccggcgcgacgccggccgaccgcaggctgatgacctccgattcggcaaacaccgtgcacatactggtaatggcgtgcggttccacgccgtcggtaatggcgtccagttgttcgacgctggcgccgagggtgcgtgaaatgacttccagaaaacggccggtgccggcggcgcatttgtcattcatcaggaagtcgctgaggttgcccccggcgtccagctggataactttgctgtcctggccgccgatatcaatcaccgtgcgggtgtccggcgccagcaggcgggcgccgaggccgtgacaagagatctccgtcacctgcttatcggcaaaatccaccagctggcggccatagccggtgagggttaaaaaaggcgtctccgtgaggccagcgcgcagtgtctcccaggcctcgtggatggcgtcggcggggcgaaagggagtggggcagaggaagcggcgcacgatgacgccgtccgccagcaggatgccttttgtggcggtggagccggaatcaatgccaaccgtatagttcacgccagctccttacagcatttcgataaaggcggcgacgcgggtgctgagctggccgaggtccgctgtcgaatagtcggtttcaatcgccatgtaaggaagatcgtgctgttggcgcagatggcgtttaatcgccagcgattccacggcataggtatggcaggcctgcaaaatgacgtcgatcaccccgtcggcctgatactcctccaccatctggctcagcagctgcagacgctggtcgttgggggagatacaggagcagccgatggcgagatatttatcggttaaggcgtcgtagacgtcgccctcttccgccacgcagcgctcggtcgctttcgcgccggtgcagttctcatagccgaccacccagccgccgttttcctcgatggcgcggaccactttttccgccgcgccgccgatcgggcagccggtgatcaggatccgcggacgaggttccagccgtttaccctgctgccactcctgatggatgcgctccgccatggcatgcagttcatcaatcagggcggttttgtcgaaacgaaaagtggcgccgtacaccactttcaggatgtcgccgccgctgagcgccggcggattgagctgcccgagacgataaaagtgggccagcgcccggcgctcgcgatttttcaacacgatggcttcgcgcagcgccgcctcgctaatcggcgtgccaaaccgggcctcaatcacctgctgcaggcgcaggatctccgttttccacagtgcgcgcgaggcggcatcgctggcgctgttcggcaactgcatgacgtggaccgccttgaactcggccatgtactcatacattttctttttgccgtcgcaggtggtttccccaaccaccaggtcagagaaatagaagtagggacatttatcggttttgccgaagccgtagctgcttttgataagcgggcagaggttgcgcgggagatctttttccgcttcctcgatggtttcatcggaggttgagcacagcgagacgacaacggcgcccgccgccatggcgatctcctggggcataaaggtgcagtaagtgcccaccagcggtacgttctgctctttaagatccatgacggtgagaaagcccttctggcgagcttctgagaactggtcaaaaatggcgggtagatcggtgataagcgacatggttttccttccccgtacacgggagatgctgaaagagtcgccattatagccatgatgtatgcagggttttattgatctcctgcgtctgtacgcggtgttaatagacctttttcaaatccatctcttcctggatacgctcgctccatgcctgatgggtgcggatggcctcttcgataccggcgttgtaaaacagcggccccagctctttggcgataaagtcgacgaaaaattcggcgtcaaactgctccagttcgaggtcgaaggtctctgcgcagtacttgctgagcctgtcgcgcagcaggtcgcgctgcgcctggctgagttcaatgtcattcatgatggggctttctccgtaaaagggctcacgactgccgggcttcgatcaccgcttgtccgcgctggtggcgtaacagtccggccaggcagcaggcggcgacaatcccggcggccaccgccaacaggtggaaggggagtctgccgccatggaaccacagccagcgcgcgccttcaattgataacgcgctgacgctgaggatcacgatattcagcgaggcggagaccgtgcctttcggcaggtcgttggaaaagagggtaaagcgaaacagcgtcgggaaaatcagcccgatgccgaaggcgtagaagcaggtgccgagcaccgaccacagccagacgtggggccataccagattgccaacgatcaggatggccaggccgagcatctgtaccggcaccgcgctgaggacaaagcgcgggcgggtagggtcttttacccagcgcgccaccgacaggttggcgatgataacggcgctgaagaccggcacctggctccaggcgaactcgctggtggtcagtccgccggcgtccattaaaatcactggcgataccgccacccagctcatcagcggaatatagctcagcgacagcgtggcggcgccgagtaaaaagatgcggttgcgaaagacgttgcgaaaatcgcgcagcacgcccagggggctgaacggcacatcgccgcggcgcaccgtctccggcatggtcaacagcaggccgagccaggccaccaatcccatggcggcgataatgccgaacagcgctttccagtgaatgaaatgcatcagcgccgcgccggagagcgggccgacgatcggcgccaccagcacgacggaggtgatcactgccatcagcctgatcgaccttttttcctcaaaggcctcctgtacggtgacgtagccgacggtggcgataaagcagatgctggtgccctgcacgaagcgggtaatcaggaactgcgtcatggaggtagtgaacagggtcgccaggcatgcgagggtgaaaatcagcgcgccggtgagcagcaccggacgccgtcctatccggtcagagagcggccccagcagccactgtagcgccatgccgccggccatatacaggctcaccgaggccggagccagcgccacatcagcattgaaatcccgcaccacgtgcaggatccccggctggatcagatcggtagtgagataagcggaaaaatcatacagaattaacgccgccgggaagaacagcgcggcggcgtgtcggctcagccagtgggaaatcctgtgcatcatctcgccctccctgtggaatatttatcagcgctattgttcggatagtatcattgctaaccaatatgcagatgcagcagcgaggggatctgcgagagcagccacaacaacaggccgatggttccccccaccagggtaccgttgatgcggatgaactgcagatctttaccgatattgagctcgatctgccgcgacatatcgcgggcgtcccagctcttcactgtgtcgctgatatggcgggtgaggaaggcggcgaactccggcgccacccggtgcgccgcctgctccaggtgttcgttaagcgattcgcgcagcgcgtcgtcgcggagtaaggtttcaccgaaccactgccccgcctcggcgatacgctgcttaatacgtgagtcgtcgctgctgatatcgttttttacccagccgcgcaggtcgccccatacttcgccaagatagtggttaaaggtctcatcattttttagccaggctttgatgttatcggccttctgcgccatatccgggtcggatttcaggttatcgataagcttttgcacggcgcggtcaaaagtctgacggatctgatgcgtacggtcgtgagtcacctcgtccagcagggtattcaccgcgtcggtgaccatctcagcgctgtgctcgccgagccactcggtgggtaggagtttggccttcagcgggtgttcggtctccagccagtgtacgatgccgcgggcgataaaggcgcgggagctgtcgcgctgcagcagggcgatcagttggtttatcagcgaatcgagcagcttttgatggcgattgtcgcgggtcagtccctccagcatcatggcgctggtctgcgtcaggtcgaccttatcgatagccttatgcaccgcgcgtcgcagcagacgttgaatgcgcgcgtcatcggtcagttcgagaaaaccgctcatcacctgcagcaggtgctggccgacccgtcgggcgttctccggctggctgaaccagttgccgagcatcagggctggctgatagcggcggatcagcgcgaccagcgacggggtatcaaggaacttttcctcgacaaagcggccgaggttgtcggcgatgcggtctttattgcgcggaataatcgccgtatggcgggcgacaaagggcagcggaatacggcgaaacagagccacgaccgcaaaccagtcggccagcgccccgaccatcgccgcttcggaaatagcttttagcgcaccgacccagggcgacggtggtagcgcgagggtagtgataaaaatggcggctgcaatcagcagcagcgacagcgccagcagtttggcgcgtttcagttcagcgagtttttccatatgcttaagcatatagcctgacggcgaggtcgtgcaaaaatcgccagataatccccaggccgaagagcatcaggatcgcccccgccgcccgctcgactcgccagacgatggcgcccaggcggcgctgtatctgcggcagagcaatcgcgctcaccagcagtaaatcccagaagaacaccacgctgaccatccacagcccgctcaccgtttgctgaagcagggtcacagccggcccgagcagggaagtcatcagcgccagataaaacagggcgtttttggggttgagcagcgatgaccccagccccagcagcagctgcctgccgaaccccggacgcgctgcgcgaacgctctccatcgccagcgtcgcgggacggctgcgtatcagcaggctgccaatccacaataaatagcccgcccccagcagttcgatgagcaaaaaaagcagcggcgcctggcgcagaagcccccagccgacgatggcgagcacaatatacagcgcattgcctgcggcgatgccgagacacaatccgatgctgccgcggatccggtagcgcacggcgtagccgaccagcagaaaaaaatcagggcccggactgagcagagcgacaaagtgggacagggctaacgccgggaaggcggcgggaaagagcgtcgataaggtatgcatagtggcctcgataatggtgcagaggccaccctacgccaggtggcgtattacttattgtcagatattgatctgctttgcgcatactgccgcggcgtggcggcggtatagctgacaaaggttttatggaaatggctctgatcggcaaagccagcctgatagccaacgtcggcgataggatccccggcgcgtaagcgcgttttcgcatattcgatgcgcgccatgttgatcaaactggcaggcgtcaggccggtatcttgtttcacggcgcggataacggtctctttacgaagcgcgctgtcgtgggccagcttatccagcgacggcgacgccggcagatccatcgccaggcgctgaaacagcagggcgctggcgtgatgtggcgcctgcggcgcggcggcgcacagcggcagcgcgtgcaggagttgcgccagccgggcgggcagttgttcaaggctcccgcggttcatcagggcgacaacctgctggaaactggcaaagagagggctgtcgcgcagcagcggctgcggcgaggtgatactggcgccagggggaatatccgggcgctgcgcgcggcaccatgtcgcgtccaggtaaagcatgtgatagctgcgcggcctgtcatgcagcggattacagctatgcggcgcgtgcggcgggatcacgatcagatccccgggctgtagcaggtactcctggccagcgcacaggcagcgcgtttccccctcgataatcgcccccaccgagagctgggggtggctgtggcgcttataggcctggtggctgcgccaggtgctgcgcagctccagccacggcagacgatcgtctcgccagaaggtttggggaatatctcgggtatggttcactgctttggcctttgctgcggggataagccgtttatagcatgctgcgccgaggctgtcgcccgcctggatttgcgtaccgcgtcgaaaaaggatgtcacgcttgcagtccggggaaatatgttttcgtagcggaatgtaaaatcccggtttccggggtgccagagacattcatgggatgtagagtccctgcaggataagcaggcagggatgagccgatggcaaagggcaccacctcgacgccgcatgatgcggtgtttaaacagttcctcactcaggccgacaccgcgcgcgattttctggcgatccatctaccgcctgcgctgcgtcagcgctgcgacctcgataccttacagctggaatcggcaagctttatcgaggagagcctgcgggcctggtactccgatgtgctgtggtcactcaaaaccgcgtctggcgagggctacatttatgtggttatcgaacatcagagctcgccggatgcgcagatggccttccgcctgatgcgctacgccatcgccgcgatgcagcgccatcttgatggcggtcatacaaaactgccgctggtggtgccgatgctcttctatcacggagcgaccacgccatacccgtggtcactcaactggctggactgttttgccgatccacagctggcgagtgagctttatatctcgccctttccgctggtggatgtcacggtgatccccgacgatgagatcgttcgccaccggcgcgtggcattactcgagctgatacagaagcatattcgccagcgcgatttaatgggcattgttgagcaactgacgacgattttacttagcggggacgctaatgacagacagctaaaaacgctgtttaattatctgctgcagactggcaacgcgcgccgctttggccggtttatccacgaagtggcgcaacgggttcctcagcacagggagagattgatgactattgctgaaagattacaggaagtgggccgcagaaaaggcaaacgggaaggccggcttgaaggcagacaagaaggacagcatgccgaggcgctgcgcattgcccagaggatgctggccgacggcattgcccgcgagacggtggtgaaaatcaccggcctgaccgccgacgagatcgccgcgctggcgcattgataacgccggggcggcctgacggtcgccccggttagcctcgttatggaatattccggatatacctaactttacccgcatcgccagccatctcgactacccttaatatccttaacggcatttttgactgccttagtagcgataacaaggagacatgcgatatggcctatcagacggtgaatcctgcgaacaatcagcttattaaaacgtacccggcgcacagcgatgcggacgtggaggcggcgctgcagcaggcggatgcgctctaccattctgcctgggcaaaaggcgatattgaaccgcggctggcggtactgcataagctggctgatctgattgatagccgggcggaggagctggcaaaaatcgctagccaggagatggggaaactcattaagcagagccgcggcgaagtgaaactttgcgcgcagatcgcccgctattacgccgataacgccaaatcgttcctggcgccggtgaagtatccctccgaactgggtgaagcctgggttgagcaccatcccattggcgtcttactggcggtggagccgtggaacttcccctattaccagctgatgcgcgtcctggcgccaaacctggcggccggtaacccggttatcgccaaacacgccagcattgtgccgcactgcgcggagacctttgcccatctggtgcgtgaggccggcgcaccggagggggcgtggaccaacctgtttatctcccaggatcaggtggcgaagattatcgccgacgatcgcgtgcagggcgcggcgctcaccgggtcggagaaagccggcagcgtggtggcggcgcaggcggcgaagcatattaagaaatcaacgctggaactgggcggcaatgatgtgtttgtcgtgctggacgatgccgacctggagcgcgcggtgaaaatcggcgtccaggcgcggctgaacaacgccggccaggtgtgtaccgctgccaagcgctttatcctgcacgaaaatatcgcggatgcgttcctgacaaaatttagcgaggcgtttcgccaggtgaaaatcggcgatccgctggatgaaagcaccacgctggggccgctctcttccaaagatgcgctggataccctaagcaaacaggtggacgaggcggtgaaaaatggcgctaagctgcatctgggcggcaaagcggtggctcgagaaggcaatttctttgaacccaccattttgaccggtatcacccgtgataatccggcgtacttcgaagagttctttggcccggtggcgcagatctacgtggtgaaaaacgatgaggaggcaatccagctggccaatgattcccactatggtctgggcggcgcggtgttcagtcaggatatcgaacgcgccaaacggatggcctccgccattgaaaccggaatggtttatatcaactggctcaccgataccgcgccggagctgccgtttggcggcgtgaagcgttccggttacggacgggagctctccgatctcggcatcaaagagtttgtgaaccagaagctggtggtggtgcgccgctaagcctatgacccggccataaaaaaacctgccattcggcaggtttttttatggctaatgctcagcgcaccttaactttatcgcggggcgttgaccataatcagaaggtgaccccgccgcccacataggcgccatcaatcagggtgtggttcgggcgaccctctttaccgtcaacgctcacatggcggtaacccactttcaacgtcactggaccaatcggagaccagctcacgccgccgttcgcttcaacatagtttttcacgctgttgttcagaccatccggcgcgacatacccttcgccaaacacgtggatgctgtcggtcagggccacgttcactccgccgccgaccggaaacgcgacgccgttatcgccttttttcggcccgaggtagatggctttcgcgccggcgttgagcatcaccgggcccacttccaggttgtaacccgcgcccacgccgccggtctggctaccatcatcggtattcttcagccagtggctttcggcgtacaggccagaagaggatttacccatttccatattcagattagtgaagtttttaccctgttcaacggtaaaccccaccgccatggcggaaccagagaccgcggtcagggctgcaagaataaggatgttaagctttctcatggtttactcctcgtcaataaagttgtctgagggcaccttaacaagcgatgtttacctctgcaaatgtgacttgcgtcgattttttatgctggttttgtcagggaggtgttttgaaaatgttgtaatgacgttgggttacggcgaggtcaatcagcaaatttagcctgtttagccgtggtttaattggtgggctaaacagaaactgaacagagcagtcattaattattaaggggcctattcattcagtttcttataatttccaaaaatgtttctactgttacttattaaaacgttgctttacatttttcgacgcgctgccgacgtttggtccctgtttttgacgaggtctcagagagaagggggcctgcgccttagggcgcaggcgggcaggttagcgtcgtaacccggcaaacgccgcgcgaatttcctcttccggcaactgaatgccgataaacaccagcgtgctgtgcggcgtttcatcgccccacgggcgatcccagtcggcgctgtagaggcgctgcacgccctggaacagcaggcgatttggctcgccgtcgatccacagcatgcctttataacgcatcaattgctcggcgaaggagagcagcagattttccattacccgtgaaacttcactgatatccaccggatagtcgagctcgaccacaatcgacgagacgtcattctgtttttctgccacaaaatgaaagcgcggtgtggcgctgacaaccttctcttccagcataaaaccgctggtgttaaacaactggcttaaatcgatatcgccgtgaatgacggtataaatcggcgcccgcgcgttaatgcgcgccagccgttcacgcagcttttcggtgtcgccggcgacgtcggttttggttaacaggatccggtccgcgtagccgacctgcgactgggcgatggtgaactgatccatctgctggtcggcatggacggcgtcaaccagggcgatcacgccgtccagcagatagcgctcgcagagcacctgatgggagaaaaaggtctggataatcggccccgggtcggccatgccggtgcattcaatcaccagccggtcaaactcgatttcgccgcgatcgcgactgtcgaggagatcgagcagggcgtcttccagttcgttggagcgtgtacagcagatacagccgttggtcagggttttaatctgcgtggcgcggtcgccgatgagctgatcgtcaacggagacttcgccgaattcgttttcaattacggcgattttgaaaccgtgctgctcattgaggatatggcgcaggagggtggtttttcctgcgccgagaaaaccggtgagtagggtgactgcaatcggtgccattattgcctccattaacagcagcgtacgccgcctttgccgtcgccgccgtagcgtgcctgctggcgttcgcggaagaattcttcataagtcatgtacggctgatccggatggttggtttgcatatgcgtgacgtagttgtcgtaatccggaatgccaatcagcatttttgccgcctgaccgagatatttttttgcctgacctaagttaccaaacattataagttccagataacgaataaagccggatggcggctagcgccatatccggcctacgttaatgcgcttttggtaggccggatacgcgtagcgctatccggcatcagggttaatgatgtgacgaggtcttcacgccgccttccggtaccggcacatacggagtctctttgtcggtacgcaccttattgttgcggacattgagccaggttttgatgccgtagaagatgatgctatacaccaccaccaggaacagaatactcaggccggcgttggtgtagttgttgaccacgatatggttcatgttggcgatctgctgcgcggtcagctcgccgccggcggcaatcttctctttatactgctgagccataaagaagaagccttccatctgcgggttgctgctgaacagcttcaggcccagcgcccaggtggtgcacagcagcagccatgccgccgggataacggtgacccagatatatttggtgcgctgcatcttgaccagcaccacggtgccaagcaccagcgccacggcggccagcatctggttagagatcccgaacagcggccacaggctcttcacgccgcccagcgggtcgaccacgccctgatacagcaggtagccccacagcccgacgcagccggcggtaccgataatcccggcgaccagcgagtcggtttttttcaggaacggcacgaagttacccaacagatcctgcagcataaagcggcctgcgcgggtacccgcatccagcgcggtgaggataaacagcgcttcaaacaggataccgaagtggtaccagaagcccatatccgccatcgggatgattttatggaatacgtgggcgataccgacggccagcgtcggcgcgccgccagcgcggttcagtaccgaaggttcgccgatatctttcgccgtctgcaggatctgctcaggtgaaatcacaaagccccaggagctgacggtcgccgccgcgtggacggtcacttctttcaactgcgctgcaatcatcgccgcgttctcaccgcccatttcatgcaggttcggcatgacgatgcccaggcctgccggcggggtgttcatcgcgaagtagagacccggttcgataatcgaggccgcaaccagcgccatgactgcaacaaaggattccatcagcatcgcgccgtagccaataaagcgggcatcggtttcgttggccagcagcttcggcgtagtaccggaggcgatcagcgcgtggaagccggagaccgcgccgcaggcgatggtgataaacaggaacgggaacagggcgcctttccacagcggaccggtaccatcaatgtactgggtcactgccggcattttcaggtccgggttgaggataacaatccccagcgccaggccgacgatcacgccgattttcaggaaggtggccagataatcgcgcggtgccagaatcagccataccggcagcagggcggaaataaacgcgtagccaatcagggtaaaggtgatagtggtatctttaaaggtcaacgccgggccccagtacgggtcgtgggcaatcacgccgccgaaccagatagaggccaccagcagcacgataccgataaccgacacttcaccgacgcggcctgggcgcaggaagcgcatgtagatccccataaacagggcgataggcaccgtcgagcagacggtaaacacgccccacgggctttccgccagcgctttcaccacgatgagcgccagcaccgcgaggatgatgatcataatcaggaagcagccgaacagggcgatagagcccggaaccggccccatctcctgtttaatcatctcgcccagcgaggcgccgttacgccgcgaggagataaacagcaccatgaagtcctgtaccgcgcccgccagcaccacgccggccagcagccacagggtacccggcagataacccatttgcgcggccagtaccgggccaaccagcgggccggcgccggcgatcgcggcaaagtggtggccaaacagcacgtagcggttggttggcacatagttcaggccatcgttattaatgaccgccggcgtggagcgcgtcgggtcaagcttcatcaccttctgcgcgatgtacaggctgtaataacggtaggcgacgaggtacacagaaaccgatgcgacgacgatccacagggcactgacgtgctcaccgcggcgcagggcgacgactgagaggcaaaatgccccgatgattccgagaatcacccagggtatgtgcttgaatagttttttggtatccatagtaaaacctggcgttaattagatgaataattggccgaagccgtctggttttaagtaagggttgatggaggtattgattagctaggctgcctccgatcttgccagaacagcgcgcgcgtaaagttgggtaaatcggtgagtggttgtatagggggttaagcggttacttgcgggggtaagcggttagatatgagtacgagagcgcgtaaatgtgtgattaagctcacaatattattctgcgcatctcaaagatatgctttcaaactgaggataacgatttttatcacccgcagatcactatctttatttcaagtagaggtattttgatattatgctgactttgccatgtcgtatggatagcgtttaacaaagggaattcgagttatgaaatttgtaaagataatgatcatcgccagtgctttttacttaacatatgctcatgcaagagagatacatcaggctgttgatgagccggcagccccttataatttgcgctgggggatgagttacgatgaggccagaaacacgcctttatattctctggaggtatcagatatcaattatgccggaaaagacccgtatctgattatctcaacgctgactccccaggaagtgggggcgttgaaatatcaggagatgaagctttatttcgataagaataaagggctgaaaagtgtttttgttagcgctgatgttgattccagtcagcaggcctataaagttgatgatggccgggaagcactcgccttatataatgaggaagttaaggttcttgatcgagaatatgggccagcgacaatcaaagaagagttcattgcagaaaaagggaaattctatcaaagtctttccgcctgcattgcaaaacagcaggagtggtataataaaagattagatctgaataaaataacaaattgttcaacctggcaacgtacttataaaaaaggtcgggtaaccgttttgctatacatcgaaccgagacaagtttccaaacattatatttataaataaattaaaggacttaacggtgagaatatataagattttttttagaattattgccatggtcattatggttatgatcctttctgattgtcgtcagtcgtattatattgccagaaatacggggcgcaatataatgaccttatccgaccatcagcgcgctaaatcggcgttaaacgctaacgatttaaatgcagctcagggctacctgacgggagaaaaatacaataatcgctacaggcctgttagcggtgaggaatcctggggaagtttacaatatcgggcggcgaaaatcgtcgccaacgccgcggcgaacggtcaaaaagtgcgtgatgatgcgctctatctcgcttatatctctttgtttgaagcagaagagggagtgcccgaacatcccgatattatgttgggttacatgcataaagccatggcgctactgttagcgaatccgcaattactcgataaaatcgattctaaaaatgtcagtactttacccagccagtttacccttgaacgctatgctgtatggcaatatttatacgatggcggcgagattgactggaccaaaaaagcgcctgaaggtgaaggttatacaattgctggtgaaagctatcagacctggaatatcaagttaaaaaaagctatctggaatcggggagacgcttttttaacaaatataggtaaacaacaatttattcatgacgctatagattattcgcaattcccggttattgcctgtaccgccaggcgaaaaggctggcacttaacattacctgctgactaccgggaacaaaatttccgcggcggtggacgttttgattgggcttcatgtcgcgctgttgaataaggttggcgggtgagatgacgcatattaagcgccaggtttacgtatcgggcgataagtaaacctgggcgcggattttagactgccacttccatttccatcatcaccgggtggaaacggcgtttaaagtaaatcaggccgtgcccttgcgggctcagggtaatattgcggatctccaccagatacaccaggtgggtaccgatggtttgcacctggctaatttcgccttcgaggctggccagcgagcccttcagcaccggctgcccgagcgcgccctgctgccagccgctgagggcaaaccgctcttccatcgtcaccccggtcatcccggcgaaatgacgggccatgatttcctgctcgtggttcagcacgttgatgcacaacttgccgttgccctgaaagaccgggttcatcgcgctgttggcgttgatacaaaccatcaccgatggcggcgtatccgtcaccgagcaaaccgccgtggcggtaatgccgcagcggccggcttcacctgcggtggtgacaacgttaaccgcagccgacaggctggccatggcatcgcgaaaacgcaggcgttgttcatctaattgcattatgacctcccgctgtgaattacttcagcagcttatccaacatgttgatatcagcattattgtgcagatgcggcaccgtccagccgttctggtcgtactcggacaggcagcggtcgaccatcgccatcatcttgtccatattgccggagctctgcgcctggcgcagacactgcaggcgaatttcatcctggctaccggagtagttgatctcatacagttcatggcggccgccgaattcgctgccgatggcgtcccacatcagtttgaggattttgatacgttcaacgtggtccataccgttggagccgcgcacgtacttcgccagatactggtcgatctgcgggttgttcagatcgcgggcgctggatggcagataaatcaggccgctggtgacgttgcgctcgatgatgttcttgatcttggcgtaggccatcggggccatcacgcgataggtctgcagcgcggcgtgatccggcagccatgcgccgttgacccacggcgtcgcttccgagcacatagaatcgcttaacgcccagaacatattgcgccacgccaccacttcgccaaggtcggcctgcacgccgcggaattcgagggtgccggtacattccagagagcgtttcagcagggcggtgataaagtccagttttaccgccaggcgcacgcaggcctgcagcgggtacatgcgggcgaaaccaccttccatggtccagcggcggcagcggtcaaagtcgcgataaatcagtacgttctcccatgggatcagcaccttatccattaccagaatcgcgtcgttctcgtcgaaacggctggaaagcggatagtcgtacggcgatccggtcgcgccggcgaccatctcataggaggcgcgggagataagcttgacgccttcggcatccatcggcgcgacgaacatcagcgcgaagtccgggttctcgcccatcacctgtgcggagccgaagccgatcatgttgtagtgggtcagcgccgagttggtggcgaccactttcgcgccgctgacgatgatcccggcatcagtctctttttccagcttgatgtagacatccttcacttcatcagctggcttgtggcggtcaatcggcgggttgacgatagcgtggttaaagtacaggccggtttcctgaatgcgggtgtaccagttgcgggcgttctgctcgaactggccgtaaaacgccgggttggcgcccagcgcgcagccgaaggcggctttgtagtctggggtgcggcccatccagccgtagcttaagcgcgaccattcggcgatggcgtcgcgctgctggcgcagatcgtcggcgcttttcgccacgcggaagaatttatgggtgtagccgccgctgccggtatcggtgccccagcacagggaatcctgcatctccggtttgtgcagcgcatcgtacagctgagcgacggaggccgcggcattacggaaggccggatgcgtggtgacgtctttcacgcgctcgccgtagatataaatttcgcggccatcctgcaggctttttaaatactcttcgccagttaacgggcgtttcgcgtcggcgcggaaatcttcaggtttcataggggcctcttcagtatttatcggaataataatgttaaatatatgttttgtttttgttgtttaattgaagcggttatggcgcttgtcgtgaagggacgtttgcgacaacggcgggtacttttcaggcgggagtgaattttgtgatctctgcaacttttaccggctggcgcggcgctgacccgccctacggtctgtagcccaggcaagcgcagcgccgccggggtattacgacaccggtactttttgcgcccggtagctgctgggcgagcagccgacctggcggctaaaaaagcgcgcaaaataggcggggtctttaaaccccagctgccaggcaatctcattgaccgcgctatcggaaaacagcagcaggcgcttcgcctcgcgtagctgacggtcgaatatcaatcgcttcggcgggcggttggcgaagcggcgacagatgtcggtcaaccgcgattcggtcagatgcagctccctggcgtaatccggtaccgtccagtgctgatggtagtggctgtcgatcatctggttaaagcgctggaatagcttcagctcgccgcgcatcccactggcggcgtgatcgtcgagctttgcgttacgcagcagcagggtaaagaccgcctgcgccagtagcgccagggtatgctcccgccccggcaactgggcggtagattcccggcgaatcagctgccagtagtgggccagcgccgccagctcgtcgggtttatccgccagcgacaggcagatccccggcaggccgaaggtctcccgcgtgccgggataaagtacctccagcagcggccagatcagctcctcatggaccgtcaacacatggccatcgctatcggactcggtaataaaagcgtgcggtaccgagggcggcgttatcacaaacagcggcgcctgcaccgaatagcgatggtcatcaagctgcagctcaatctgtccggtatcaaggtagtgcatctggaaatagcggtcgtggcgatgcgcctgcatgtcgcggccaaaaaaggccgccatgcgggagaacgactggtagtgcacctcttcggtacccagactctcgtcgtaatctttattgatgtcgatgttggcgatggaatgctggcacatacccgctccttagtggcctttttgcgccgctaatcccggcgcggcggcggcgtcctcacgctggctcattggaatgcgggtaagcaccagcgcaccgacgatcagtaaaccggcgacaaaccacagcccggagctaaagctgccggtggtatcgcgcaaaatgccgatcaacagcgggctgacggcagagccgacgttgccgatagcgttgatcaccgccagcgccaccgcgcgcgactgcaggctgatcacccgatccggggtggtccagaaaatggccatcgcggtaaaggatcccaccgaagccataataatgccgatcagttggatcaggctgtggtgcgttgccgaagccagcagccaacccgccgcggcgaacaggtagggcaggatggtatgcatcttgcgctctttgcggcggtcggatcggcggctccaccagatcatgccgaaaatagtgcagaactgcgggatcgccgccagcaggccaatcatgatgttgctactgccggtgttgaagctctgcaggatctgcggcgtccagatattaatggcgctgagggtattggtcaggcagaagtaggcgagggtatacatcagcaccgctggcgtcagtacttcgcgcagcgtggaacgcggcgaagccgggacgatcgccgcatgttcccgttcgcgatcgatcatcgccatcagcgcctgtttctcttcgttatccagccagttggctttatccggcgtgtcgttgaggaagaaccaggtgacgacgccgagcaccaccgacggcaggccttccagcagaaatagccattgccagcctttcaggttccacaggccgtcgagcgccagaatatagccggaaagtatcgagccgagcatcatggtcaccggcatggcgatcataaacagggcgttggcgcgggcgcgatggtaggccgggaaccaccaggtcagatagacgaggatccccggcagaaaaccagcctcggcgatgccgaccagcatgcgcaggatgtacagcgtatgcgggctggtggcgaacatggtgcaggtcgaggcgatcccccagaccaccatgatcccggcgatccagcggcgcgcgccaactttcgccagcatgatattgctggggatcccgcacagcacgtaggtgacgtagaacagcgtcgccgccaggccgaacatggtggaggtcaggccgagatctttacccatcgtcagaccggcaaagccgatattaattcgatccaaaaatgagaaaacaaagagaacaaacaggaaagtaatcaggcggcggaacagctttttgatcacccggttttctacttcaacggctttattatcattgtgttgcagggtagaggtagtcatgttgcgctccacattatccgttcaatagacggatttattgttatcggttgtggtggttgcgttgtgggtaaaccgggccgccagcgcttctgcgccgcgggccagcagggtggtatcgacgccgacggcgacgaacagcgcgcccagttcgagatagcgtttcgccagctgttcattagccatcaggatccccggcgctttaccggcctgacggatttgctggatggcatcttcaatggcggcctgcacttccgggtgctgcggattgccgccgtggcccatatcagcgctgagatccgccgggccgataaacacaccatctaccccgtcgacatcgaggatctgcggcagatttttcagcgcttcgcgagtctcaatctgtaccagcacgcacatggcgtcattggcctggtggatataatccgggacgcgattccagcgtgaggcgcgggccagcgcgctgccgacgccgcggatgccggctggcggatagcgggtggctctgaccgccagccgcgcctcttcggcattctgcaccatcggcaccagcagggtttgcgcgccgacatccagcagctgtttgatctgcaccggatcgttccacgacggacgcaccaccggctggctggggtagggcgcaatggcctgcagctgggtcagcaccgttggtacattgttgggcgcgtgttcgccgtcgatcagcagccagtcgaagcccgcgccggccagcagttcggcgctgtagctgctgcacagtccaagccacaggccgatttgcggacggcccgcttttaaggcgtctttaaaggcgttattcatggtgtttctcctagacaaaccggcagctgatggcgcccatgttgccgtagtcgacgtggaaggtatcgcccttgcgcgccgggaccgggcgggtgaaggagccgccgaggataatctgcccggcttcgagctggacatcgtacggcgccagcttgttggccagccaggccacgccgttggccggatgattgagtacgcccgcggcgacgccggtctcctcaatcacgccgttgcgatacagcagggcggagatccagcgcaggtcgagctcgtccggtttaatcggccggccgccgaggatcaccccggcgttggcggcgttgtcggagatggtgtcgaacactttgcgcggacgctgggtttccgggtcgatgttgtggcagcgcgcgtcgataagctccagcgccgggataacgtagtcggtggcgttgtagacatcaaacagcgtacagttcgggccgcgcagcggtttagccagcacgaaggccagctcgacttcgatacgcggcacgataaagcggtcggtgggaatatcgctgccgtcgtggaagaacatatcgtcgagcagcgcgccgtagtccggctcgctgatctgcgaactggcctgcatcgctttagaggtcaggccgatcttgtggcctttgagcacgcggccttcggcgatcttcatctcgacccactcgcgctggacggcgtaggcgtcctcaatggtgatcgacggataatccagcgagatcgcgcggatctgttcacgctgcttttcggcctggttcagccgctgggcaatcagggtacgggtctgtttatcgagcatagagattcctgtggcattgtattgccggatggcgcttcgcttatccggcctacaaattcatggccgttgtaggcccggtaagcgcagcgccaccgggcaatttgcacattatttaaataacgcgtgcacgttgttttgtttgtagttcagcgtcgggtcgagctcttccatggcgaacgacagcgccagatagcggctctccattagcgtcgcgaagtgggatttgatcagcgcgaacagcatatctcccacgtcctgacggctctccaggctgcgcccggcgccgatcttcagggtcatatgcacgaaggcgtaatcctgcctgccgtcggccatctgccaggtatccagccagtgggcgcggctgcggatcccgccgatcggaaagatgccggtggcggccagcgcctcgttgactttggcgaacagcccaggcagatcggcctgctcgcggatgttgtcggtacattcggcgataaaatgcggcatggggcccccttacgcctgcgctggcaacgggaacacggcgttaacctggccggtaccggagctggcgaatagctcggtgataaactccaccttgccgtcgtatttatcccaacccagcaggccgagcagcatcaccgtgtcgtgcatgttgccttcgccgtagcagtagtcggcatactccggcagcatggtgcagaactctttgaatttgccctcgcgccacagcttcaccacccgctcatccatctgatgatcaaactcgcgggtgtagctgttcatcccctcttcggcgcgctggtcatcgataaagcggtgcgacagcgaaccgctggccagcaccgccacggtgccgtcgtatttctcaatggctttgaggatcgcttcgcccagcctgcggctgtcggcaaagtcgtgaacggtacagaaagcagagatagataccaccttgaagtgcttatcgctgttcatgtagcgcatcggcaccagggtgccgtactccagcttcaggctgggaatattgtgcgctttggcacgcaccccgagcttcaccgcctcgtcggcgataagctggcccagctccgggttgccgtcgtagtcgtaggtcatgtcgcgaatgaaatgcggcagttcgttactggtgtagacgccctgaaaatggtcggcgcagttgatgtggtaggcgctgttgaccagccagtgggtatcaaacacgataatggtatcgacgcccatttcacggcagcgcttgccaatttctttatgcccgtcgatcgcgccctgacggcagccgtggtttttccccggcagctcagacagatacatcgacggcacgtgagtgatttttgctgctaacgctaacttacccatatcagactccccatttcgggatcggatggtcgcccatcgagatgcagacgtttttcatttcggcgaacacttcaaagctgtactcgccgccttcgcggccggtgccggaggccttcacgccgccgaacggctgacgcaggtcgcgcacgttctgggtgttgacgaacaccatcccggcttcaataccgcgcgccagacgcagcactttgctgacgtcctgggtccagatatacgacgccaggccgtattccacatcgttcgccaggcgcagcccttccgcttcgtctttgaacggcagcaggcaggcgaccgggccaaaaatctcttcctgggcgacgcgcatacggttgtcgacatccgccagcaccgtcgggcgcaggaagttgccggctttcagatgcgccggcaggtcggacggtttatccgcgccgccagccagcagggtggccccctcttcgatgccgaggcgaatgtagccggacactttctcccagtgctgctggctaatcagcgcgccgatctgggtgttcggatcggtcggatcgcctacgcgcaggcgattggcgcgctcggcgaagcgtttaacgaactcggggtagatactctgctgaataaagatgcgcgagccggcggtgcagcgttcgccgttgatcgagaagatggtgaacagcgcggcgtcaagcgcgcgctcgatatcggcatcttcaaaaatcagcaccggcgattttccgcccagctccatggagtactttttcagaccggcgtttttcatgatgttgcggccggtggcggtgccgccggtgaaggagacggcgcgcacatcatgatggcgcaccagcgcgtcgccggcggtggcgccgtagccctgcaccacattgagtacgccagccgggatcccggcttccagcgccagctcgcccagacgatcggcggtcagcggcgacagttcggacattttcagcaccgcggtattccccagcgccaggcacggcgccaccttccaggtggcggtcataaacggcacgttccacggcgacaccagcgcgcagacgccaaccggctgcacgagggtgtagttcagcatcttgtcgtcgaccggataggtcttgccgttcatctgctggcatacttcggcgaaaaattcgaaattgtgtgaggcgcgcgggatcaacacgtttttggtctggtggatcggcaggccggtatcggcggtttccatcgccgcgatctccgggacgttctgatcgatcagatcccccaggcggcgcatcaggcgcgcgcgctctttcatcggcaggttagcccacttcgggaaggcctctttcgccgccgccaccgcctggtttatttcggcttcaccgccggaggcgacttccgccagtacctcgccggtggccgggttggtggtatgaaaatagtctgcgccggcaacgtttttaccgttgatccaatggttaatctttttcatgacagtgtctcctcatacgcttgctggctgatgatatggttgaccaggcggcccacgccctcgacttcaacgatcacctcgtcgcccggtaccacgtcggatagccctttcggcgtgccggtggcgatcatgtcgcccggttgcagggtcataaattcgcttaaataagcgatgaggaacgggatgctgaagatcagatcggcggtggtgccctgctggcgcagctcgccgttgacccaggtgcgcagggccagattatgcggatccgggatcgcctctttgctgacgatccacgggccgatcggcgtcagggtgtcgcggcttttcacccgcaggttcgggcggtagtagttttccagatagtcgcggatcgcgtagtcattgcacacggtatagccggcgacataatccatagcctcggcttcgctgacgcggcgcgcggttttcccaatcaccaccaccagttcggcttcgtagtgcatgtattcgacgttatccgggcgtaccgactgctgctggtggccagtaaaggtgttcggcgctttgatgaataccaaaggctcggttggcggtttaaattccagctcgctggcgtggtcggcgtaattcagccccagcgcgaacagcgtgccgtcggcgggcggcagccagcggaattccccttcttttaataccgtgccatcgtccaggcgcacctggtcgcgttcatcgaccagcacgtcgcgtacctgtccctgccattcaatgcgtgcctgtttcatgccagctctccttctgcgacaaccgggttttcgagcgccgggaaaccgtcggcgagaatacgtacccggtcgccggggcgcagcgtgacgcgagagtggggcgtgccgataaggatcgcgtcgccgggattgagggtggcgaattcgctcaaggcgctcagcagctgcgcggcattacgctgcagatcgccggtatgccagctatccgcctcgcggccgttaatttcggtgatgatggtcagatcgtccacgttgcgtaccgccgatagcgtgccgatggggcagaagccatcgcggcacttggctttgatcgccgggcgataaaaactctcttccggcagactcacatcgttagccagcgcgtagccggcgatatagttcgccgcctcttccgccgccactttacgcgcggttttgccgacaatcagcgccaccgttgcgccgctttgtacggtctcgccctgcggatacgggatcgcttcgccatcgccaattacggtattgcgcggcttgataaaccagaccgcggttttcggcggcgtcttgtagggggcctgttgaaacgcctcgcgccaggcgtcgagctggctgcgatgattgagcgcaacggcgaagatggtacctttcattcaccactcctctgggacagatttcggttcaaagggatttcgttaatatattaatgatcatcttttatgctttgcgctgaggtttagcaactggaagtgaatgttttgtgatcggattaacacaatatttacataacaattacttatttgttataaatcaatagattgaatatttttcaggaaaagactggtacttttcaggtgcagaaaccggttgtacatggcaggattaacgctaattattaagttattaataagtttttggtgaggctgttgaggggatactatgcatgattcattaaccattgccttgttgcaggcgcgtgaagcggcgatggcctactttcgaccgatcgtcaaacggcacaatctcaccgaacagcagtggcggatcgtgcgaattctcgccgaacgtccgtcgatggattttcacgatctggcctttcgcgcctgtatcctgcgccctagcctgaccggtattttgacgcgcatggagcgggatgggctggtgctgcgcttaaagccagttaacgatcagcgcaagctgtacgtctcgctgacgcctgccggaactgcgctgtacgaaagcgcccaggcggaggtggaagagacctatcgcctgctggaggcccagttcaccacggaaaagctgcagcaactgacctccctgctggaggagtttattgcgcttggcgtccctgccgggcgcggtgatgaagaagagtagcggttacggctcggcgctcagcctggcgagggcaataagcgtttccgcgcgggcgggggacagcggctctctcggctgcggcagcggccagccgtacaaccagcgggcgctgggtcagtttggcctgcagccagtcgtcggcggcagccacgtcgccgcagcgcacatcctcgcagcggcacagcaggctctccggcgtcgccgcgtttttcaaagattccgccagccggaaggcgcggtttatggcgtcggcgaagcgctgccagcggcgggagcggcgcttgctcaatgatattcgtcacgtcgcctccggcctggttcatcgtatccgccaccgcctgcaggccgcccgcgctgcagcagaggatcagtttctgccagtaaaccacgccgccgccatcggcggtttcaaacagcacgctgtgcgcggaggggcgggcaatcagccgcgcgccgttcacctcccggatggcggcgatgtcgttggggatttactactggggcgcgcgcagctgcctgccgcaggctaactttagcggagacgaagaagagtaaaggagaacagtatggagtcggtaactctatcgttacctgaagcttatgacctggcgctggaggtactcagcgccaatggatttagcgccgaccacgcggcggcgattgcccgcaatgtgaccgccggggagcgcgacggctgcgcttcccacggcctgtggcggctgttgggcattgtcgataccctgcgcaaaggtaaggtatcgcccgatgccgagccgcagatccatgaccaggcgccggcgattgcgcgggcggacgccgggggcgctttttcattgctggcctacgagcgcgcgctgccgctgctgctggagaaggcgcgccacaatggcattgcggcgctggcaatcaatcgctgcgttcatttttccgcgctgtttgccgatattgagccgttgaccgaggcagggctggtagggctggcctgtacgccaaaccacgcctgggtcgccccggcgggcggcacacgtccgctgttcggcaccaaccccatcgccttcggctggccgcggcaggataagccgccgtttattgttgatatggcgaccagcgccgcggcgcgcggcgagatccagctgcatcagcgcgccggcaaagcgctaccggaaggctggggaatcgacagtcagggacagccaacgaccgatgccgcagaggtgctgaacggcgcgatgttgactttcggcggccataagggctcggcgctggcggcaatggttgagctgttggccgggccgcttatcggcgatatgaccagcgccgaatcgctggcgtgggataacggcgcgggcggtctcccctacggcggcgagctgattctggcgctggatccgcagcgctttctcggcgcgcaggcacaagagcagctggagcgcgccgaaacgctgttcaatgcgatgcaggatcagggcgcgcggctgccgggcgagcggcgtttcgcctgccgccagcagagtgaacggcagggggtcattatcagtcgttcattgcatgatgagatttgcgccttgcgccagggcgggtaaggcgcgaagcgccgccacccgggatgcctgtcaaaacagcgtgtcgagctcgtccagcacgttgtagtcgtcatcgaccagcagcaacgtcttccacttatcaaaggtcagacacgggtgcgaggtgccgaacagcagaatatcgccgacctgcacatcgctgcccggcgccaggcgcagcatacagtgctgatccatgatgccggtgctgacgatcgactccgcgcgcagcgctaactcctggccgttacgataatgggcgatcggctgcggcagcccggcgtcgaaagcgcagtcgcgcttgccgaagtttaccaccgcgcgatccgcctccggcaccgattgcaccatcgccatcagctccagcgctgatgtaagatcgccggcgagatcgcaggcaatcggatcgcgggcgatcagctcttgttgtgcgagatcgtagatcccgcgatcgtgggtgatataacagccaggacggatgacgatacggcagcggcgcggttttgccgccgccagccagatgttgcacaccacgtcataccagacggtgcccgcgccggtgagaataaattcgccgtcaaccagcggctccatgcggcaggcaagcgccgcggcctgctgtaacagcgcttccacctgcggctgcggatcgtcgccgtgcagcaccccttcatacaattccagtccgcgtagccgtagccccggcaggtcgcttacccgctgcgccagcgccagcgcgtcattgacgctacgacagccgcagcgcccgctaggcacgccaagttcaatcagcacatccagcgtttgtccctggtctgcgaagaatgcggagagggcgcgcacgttgacctcgctatcgacgcagcagataaaatccaccgcccgatagtgggcttttagctgcgcgaccacctgcatattggctttgccgaccagctgattaaccatcaggacgcgttggatgccgctggccattgccgcgctagcctgccagacgctgcccacgccgatcccccacgcccccgctcgctgctgcgcctgaaatatccatggcgtcattgtcgttttaccatgcggcgccagcgatacgccgcgggcgtcggcgtagcgctgcatccatgaaatattattttccagcgccgacttttttagcagcgcggcgggtagacagacctcttccgccagcagattagccggcgcggacatgagggcggatttgtgcgggatgagcggtgctgaatggtatttcataacactatcctttcagggtttataatcggttagtcgctgggtatcatttataactatttgataaatatatttttaatataaaaatgttattctttttgaataaaagtatcacaaagcgatctgagttttgcgtagttttccactgttttttgcgcttgtaaatggttaacttatcggcatgtcgaaagggagtaattgctatgaaagttgactggcttttcaaaaacgtcacggtgatcgacgggagcggcgggccgcaataccgtgctgatgtggcggtgaagggcgatcgaattatggctatcgccccggcgctggacgttgcggcggagcaggtgattgatggccaggggcgggtactggcgccgggctttattgatgtgcatacccatgatgatatcaacgtgatccgcatgccggagtacttgccgaagctcagccagggggtgacgacggtgatcgtcggcaactgcgggatcagtgcggcgaccgccaccatgcggggggaagtgccggacccaatgaatctcctcggcgagcagcaacactttatctatcccaccgtggaggcttatgcccatgcggtggaggcggcgcgaccgtcgctgaacgtcggcacgttaatcggtcacaccgcgctgcgcaataaccatatggacgatctgtttcgtccggcgaacgagacggaaatcgccggcatgcgcgtacagctacgcgatgcgctgcgccagggagcattagggctcagtaccgggctggcctacgccagcgccttccagtcgaccaccgaggaggtgatggcgctggcggaagagctggcggccgggaagggcgtctataccacccatttacgttcagagtttgagccgattctcgaggcgctggacgaagccttccgtattggccgtcacggcaacgtgccggtggtggtttcgcaccacaagtgcgccggggcaaaaaactgggggcgtaccaaagagacgctggcgtttttcgatgagatgcgccagcagcaggatatcgcctgcgactgttatccctattcagccagctcatcgacgctggatatgaaacaggtgaccgacgagtttgatatcgtgattacctggtccgaagcgcagccggagcaggcggggaaaacgctgcagcagatcgccgatgagtggcaggtgagcctgcacgacgccgcggcgcggctgatgccggcgggcgctatttatcacaacatggatgagcaggacgtacggcgggtgatgcgctatccggtcaccatgattggctctgacgggctgccgaacgatccgatgccgcatccgcgcctgtggggcgccttcccgcgggtgctcggccactatagccgcgacgagcagctattcccgctgactaccgcggtacacaagatgaccgggctgtcggcggcgcgcttccaactggcggatcgcgggctggtgaaaattggctactttgccgacctggtgctgtttgacccgcagacggtgcgcgatgtcgccagtttctccgacccgaaacgaccggcggacggcattgaggcggtgatggtcaacggcgtgatgagctacggcagtgataagaaaattaccggacgggcagggcgtttcctgcgtcgtcggatggactaaggagttgagtatgagtatcaagcgttatggcgtagaaggcggtaccggtaccggcgggcagcacctgccgttcgcgcgggcggtggaagcgggaggctggctgtacgtttccggccagacgccgatgaaaaatggcgaagtcttggaaggcgggattgtcgaccagtcgcgtctggcgattcagaactgcgtagatatcatgaccgaagcgggctacaccctggccgacgtggtgcatgttaaagtgatcctcaccgatgcgcgctattttcagtcgttcaataaggtatttcgcgagttctttggcgacaacccgcctgcccgcatctgctgcgtagcggacctggtggtggattgtaaagtcgaagtggatgtgacctgttttaacgctgcgcgacaataacgctcgaaacctaaaataaatccctccctttgcgggagggagcatcaaaaaagtgtgatatcggcaccagagtgaataaataaatcggtgccactgggttcgctatgccttttttcaggcatggttcctgttaactcataatattcagcggcacgaatattatttattacgtctggatgtgagccatgaataatatgtcatttatgatttggttttccgtttatgcctgcgcgatgattaccttaggctggtacgtttcgcgcaaacagaaaaccggcgaagactttttacttggcggtcgttcgctgccgatgatcctcactctcggttcgacggtcggcaccatggtggggaccggctccagcgtcggcgccgtcggctttggctacagcaacggctgggccgggatgctttacggcctcggcggcgcggtggggatcctgctggtggcatggttattcgcaccggtacgtaaacttcgcttcatgaccatgagtgaagaaatgtcgtattacaccggcggcagtaaaattattaaaaacctcgtcgcgatacttatttttattgcctctatcggctggctgggggcgcatatattaggcggcggattatatctggcgtgggccagcggcattgatattaatgtcgcgaaaattattatcgcgctggcttttgtggtttatgtcggtatcggcggctattccgcggtggtgtggatcgataccattcaatcgatcgtgctgttcgtgggctttattttaatggcgatactggcggttcatcacgttggcggctggagccatattcagcaggccgtcgatccggcggcgcaaagcctgttcgcggtcgataaattaggcgtgctgccggcgctatcattggcgatggtgattggcgtcggcgtgctggcgacgccttcttatcgccagcgtatttactcggcgaagaccgtctcctcggtgcgccagtcctttaccattaccggcctgctgtatctgggcttctccttcctgccggcgatcatcggtatggcggtatggaccatgaacccgcagctggaaaacagcggcttcgccttcttgtttgccacccaagtgctgccgccggtgctggcgatggcgatcctgattgccgggatgtcggccaatatgtcttccggtagctctgatgccatcgccgcggtgtccatcatgctgcgcgacctctacaccctggtgaccggccatatgcccgcgccggagaaagccattcgcctgtcgcggatcttcctggttctggtgattgcgctggcgctgctgtttgccctgacctccaacgacatcatcagctacatcaccaaaatgatctcgatgattatgtccgggatgtttatctgcaccatgcttggccgtttctggacacgctttaactggcagggcgcggtcgccgcgctggccggcggcgccggggcatcggttgcggtgctggtggatagcgactggctggcgttctggggcaacccgtgtattccggcggtgctgacgagcctggtggcctcggttgtggtgacgttactgaccccggccagcagcatgagccgcgagcaggcgctggagatgattacccgcgagcgtgaaagccgcccaacgccgccgccgctgccgattggcaaacgtcatacctcacgcgggtaaggggcaatcatgaacgagtatattgccgtcgattggggctccacccagctgcgggcatggcggatgcgtgatggcgaatgcatcgacaagctgaaactgccctgcggcgtcacgcgtctgaacgggcagcgcgccgaagcggtatttcagcagcagctggcgccgtggcgcggcgaccccgcgctgccggtggtgatggcgggcatgatcggcagcgatgccggttggcaaccggtgccttatctgacctgcccgctggcgctggaggcgctcaacggtcagttatatgaggtggcggaaaaagtgtggatcgtgccggggctgaaagtggcgcaggctgcagattacgacgtaatgcgcggtgaagaaacgcagctgctgggcgcctggcaacagatgcccgcggagtgttacgtgatgcccggcacccactgcaaatgggtgcaggtgcaaaacggcgtggtgcgccagttcgccacggcgatgaccggcgaattgcatcacctgctgcttaaccattcgctgctcggccagcaattgcctgcgcagttgccggatgaagccgctttcgccctcggtatggaaaaagggttaaatcagccggcgttattgtccgggctttttagcgcccgcgccgcgcgggtgttaggcgcgctggcggcgacttcggtgagcgattatctctccgggctgttgattggcgcggaggtggcgacattcagcgaacgctatcgcgccagccgcgtggtgctggttggtgagcactcgctcagtgtccgttatcagcaggcgatggcggcgcgtgggttagccgtttcccgttgctccggcgaggcggcgtttctttcgggtatagcgaggatgattgatggacaagattaagctggtggcgattttacgcggcattcaacccgctgaggcggcagatcatattgagacgctaataaatgcaggctttcgctatatcgaaatcccgctcaattcgccggactggcagcaaagtattccggcgatggtgcgtcagtttggcgagcgggcgatgattggcgcgggaacggtgctgaaggttgaacaggttgattttctcgctgaagccggggcgaaacttatcgtgacgcccaatacggccccggcggtgatccgccgcgcggtagataaggggatgctggtgtgcgccggctgcgcgacggcctccgaggcgtttagtgcgctggatgccggggcgcaatggctgaaaatctttccgtcatcagcattcggcgcggactatattcgcgcgctaaaagcggtgttgccgccggaggtgccggtgctggcggtcggcggcgtgacgccggaaaatctggcgacctggatacaggcggggtgcgccggtgccggtctgggcagcgatctttatcgcgccggacaggccgtggaacgtacccgcgaacaggcggagaggtttatctccgccagtaaaagttagtcccccagcggctgccgatcgacgccgccgcggtggctgtcgagcgccagcttaatacggcgtaatttgccttttgcctgggttttgttggccatcgccagttcggtggccagcacatcgaccatcgccagcatcgcgtaacgggaagtgctgggcttaaagatatagtcgttttcccgtaccagcagcggtagcaccagatccgcctgttcagccagcggcgttccggcgggggtaatcgcaataaccttcgcgccgtactggctggcaatcgccgcgctctcgatgatttcccgggtatagccgcccagagacagcacgatcaccacatcctgcggcgtcaccgccgagctcatcatgcgtaccagcagaccatcgctctggctgactaccggcagaccgaggcgaaacaggcgatactgaatttcctgagcgcagatggtcgaaccgccgcccatccccagggcgaggatctgccgcgcatcgctcagccagctcaccgcgcgcttcagcgcctcgatatccagcgcccgccggttggtctccagtacgctgatgattgactcatagatcccctggacgccttcgagatccggaacatcgaggataaaccgctggccgaccgcaagagattgcgcaagcttcatcttcagctcgcggacgtctttacagccgagcgcccgggcaaaacgggtgaccgaagcctggctggtttgcgtcagacgcgctatctcggcgatgggcagctccgccgccgccgcgacatcatcgagaataaactgcgcaatgcgtttttcggtcgccgtgagttccacaaagcgatcggttatgcaggaaataatatcgattgaccaggacatacggtaacaacgggtaagttttgaatggtactttgtaccatattgcgccgctgaaagcagtgctgaagtctacaacgccaggcgcatggcgcagcgcgactcgggcggcaggccgtgccgggtctcctgttccctttttgccgccagcccggcgggcagggtcagctcatcgagcatggcgaatcccagacgggtataaaacggcgcattccacggcacctcgcggaaggtggtgagggttaccgccgggtagcccatctgccgtgcgctctcgataacccgctccagcagcatccggccgatgccctgttgctgccaggcctggtggacggcgacttcgacgataaataacgcatcgtcgagcggttcggtcagaataaagccaacgggttgcccggcggctaccgccagcaggctatgctccgtttccagataatcatgatggcgcgcaacgctaatcacctcgctgtccgccagccaggcgagagaagggatctggcgaaatgcctgggcggcagaacgttcaatggcgggcagaagggcgatatcgctctcctgagtcaggcgtaatacggcaccggcagttatagtgttagttttcatcacctcagcatagcagccttcgggagaaaagtatggagctgaccgccgttcccgccacgcagttcagcagcgtgcagttaacggatattctcaacgcctgttttgaagcctacctggtgcctgttacccagtcggtagagggatttgttcagcgttttagcgccgaggggatgagcctggtcgattcccgcgtctggctggccggagatgaaccggcggcgatcgcgatcgtcgcgcgccgggggagtgccgctcgcctggcggcctttgccctgcgcccggcctggcgcggcaaaggcctgggccggaaactgatgcaggagctgctgatgcttttgcaacagcaggggatcgagacggtatacctggaggtgatccgcgataaccatgcggccgtcgcgctgtatcagtcgctgggctttacgcgacgctatgggctctgcggctacctgagtacagaacttctggccccggtgccgggcgtattgcagctttatcccaccctgtccctgcttcggcgcgccattgaggagagtaacagccagcttccctggctgctggatccgcttaccttcgccactctgccatgtcaggtcgtgacgctggaacagcgcgccttcgcggttctaacgacggcgggctcgcgccctgtactgtcgtttttgtgggtggagcccgccgcccgccgccaggggctggcgcgtgagctgctgatggcgctggcgcagcagttcccgggcattggtacttcggtgacggtcccggaaacttttacgccgctgtttgccgcggccggctatacgccgctctcgctgcagcagtatgaaatgacgatggatctggccgacgcgaagtcggcttagccaggagtgtgcgctggaccgcaaaaaaacagcacgggccgtcgataagcctctcttttcccgcatcatatcccttcgtaatggcgaagagggggatgcgatgcgtaaaacggaactgttggcttttttgcaaaatcagaccgattttttcgatccggataacctgagcgaggtctttaccgccagctggctggcccggcgtttcgcgatgcaaagaaataccgccagccattatctcaatcagctggtcgctcaggacgtgctggtgaaaatcaacacccggccggtctattttctgcataaaaaagccttttgccagcagttctacccgctttcccgcagtgagtatgccagcatggcggagttactcgcggagagcgaccgccagccggagcaggcggaccatttttcgttgctgaccgggcatgacggcagcctgcgtaaaccgattgagcagatgaaaaccgcgctgttttatcctaacggcgggctaccgctgcttattaccggcgacagcgggaccggcaaaagctatatggctgagctgatgcatgagttcgccatcgcccaggagctgctggcgcccgatgccccctttgtgagctttaactgcgcgcagtatgcgagtaatccggagctgctggccgccaacctgtttggctacgtcaaaggcgcgtttaccggtgcgcagagcgataaagcgggggcgtttgaggcggcaaacggcgggatgctgtttctcgatgaggtccatcgcctggatgctcagggacaggagaagctgttcacctggctggatcgtaaggagatctaccgggtgggggagaccgcgcaaggtttgccgatttcgctgcggttggtgtttgccaccaccgaagatattcacagcacttttctcaccaccttcctgcgccgaatcccgatcctggttagcttgcccgatcttcaacaccgtagccgcgaggagaaggaggcgctaacgctacagtttttctggcaggaggcgcgcacgcttgccgcccggctgcaactaacgccgcgactgttgcaggtcctgacgcagtatgtttatcggggcaacgtcgacgagctgaagaatgtggtgaaatacgccgtggcgtcagcctgggccaggtctccgggccgcgaaatgctgaccgtgaggctgcacgatctgccggagaatgtcatggccgcgacgccagcgctcagcgaagcgatgggccagcaggagccgctgcttatcgagccgcagaccagcctggtctggctgctgcgtgcgcgcgacccggtacaggggctgatctatgacgttcagtgtcgggttctggcgcagtatgaagcggtgctgaataaaaaaacggtctgggaagaggcgcaaaggagcatgggggaagagattgaaaccctcttcgatcggctgatctttgataatcatgactccagtagcccgcagatgctgctgctgatcgctcatcaggttcgggaggagtattatcgcctggaaaagcgcttcaatatccagtttaacggcaactgcctctacgcgctgagccactacctgatccaccgatcccgacaggcgcagtccacgataaacaatgaaaaagcccgccagctggaggacttcctggtacagaagtttccgctgctgtatcgcttttgcgaagcgatcctcggtgcgttgacgctgaagctggatattgaaccccagcgtatcgacctgctgctgttagtgctgtggttccacaagaatggcgccatcagccagcagcaggtgacccgggcgataattctcgctcacggttacgctaccgccagcagcatcgccaacgtggcaaaccgcttgctgaaaagccagctctttgagtcattcgatatgccgctggacgtgacgccggaggctatcgctaaccaggtgatggcctacatagagagccatgctctggcatcaggattgataatcctggtcgacatgggatcgctgaacgccattcaccgccattttaatcgtcgcctgagtacgccgatggcgatcatcaacaatgtctccaccggtatggcgatgtacgtcggggagcgcattttgcagggcgttatgctggaagatatcgtccgcgagatcggcgatgaccttgcggttgagcaccagctctattacccgcaaaccgataagccgcgggcgattttaaccacctgcgcgaccggtctgggcgcggcggcgaatctgtcggcgctgttaaaagccagcattcctgaagcgcttggcattgatattgtggcctgcgatgtggagacccttgccgatcccgcgcgacgggagccgatgctaagccgctatgaggtgctggcgatcgtcggcaccctggatccgcatcttgccgatctaccatggatctcgctggattcgctgatctctggcgaagggagtcgtccgctgatgcgcatttttggcgaactggcgacggcggagcaggtcagcgagatcaacaacctgatcctgaaaaacttttcgctgcgccgggtgatcgagtcggtgacgatcctcgatacggctaaggtgatcaaccaggttgagcagtttttgctgcgctatgagcatctggccgggcgcgatgtacctaacgatcgtaaggtcgcgctgtatgtgcatatcagctgtctgatagagcgattaattcgtcacgcttccccagcccaatacactggagggcagtgtccggatcgcgagctggctacgctacgcgaggcctttagtgtcatagagagcgggtatagtgtcaaaattcccgttgtagagctctgctacattcacgatatcctgacgcgggaaacggaatttattcaggaagatcaagacttttaacacatctcttcttttttatccttacgttagccgacgcgccactgtttctggcacgtcggttgcaattaagaaagcagtggaatgcgctttcgaggtaaggatgaaacgacactatatttttgccagccatggcagctttgctaacggtttgttgaactccgtggaactgatcctcggtaaacaacccgatatacataccttgtgtgcctacgtggaagaagaggtcgatctgacgcagcaggtggaagcgctagtggcgcgtttcccggcgcaggatgagctgatcgtaattacggatatttttgccggtagcgtgaataacgagtttgttcgttttttatctcgcccacatttccatttattatccggtttaaatctgccgttaattattgacttgctgatttccgcagcggaagacaataccgaaaaattaattaccgaggcattaacaaacgccaaagagagcattcagtactgcaatcaaacgattgccagcgcgatgactatggataaagacttctgaaatgaggaagcatgatgattacgttattaagggtagaccatcgattacttcacggccaggtggccttttcctggacccaatatgtcggcgccgattgtattttaatcgccaacgatagcgtccctggcgatgagctgcggaaaaccaccattaagcttgccaaaccgccctcggtgaagctggtgattaaaaatataaatgattctattgaggcaataaaaagcggggttaccgataaatataatttatttattgttgtggagtcggttaatgacgcctggcgtattgccagcgctatcgacgaaataaaaagcataaatcttggcggaataaaggctaaagagggcagtaaaaatatctctaaggcgattaatttactgccgacagaaatagaacagctacaacaactggtgggcaagggcgtcgaagtggagattcgccaggtcccgaacgatcgcaaacagctttttgcggaatgcgtgtaattccggaggacagattatggtagaggctctcttactgggtctggtggcgtttatcgcgcaatcggaatatgccttagggacgtcgctaatttcacggcctatcgtcaccgggctgctgaccgggctggtgctgggggatgtacagaccggcgtcattatgggcgcgacgctggagctggcgtttatcggctctttctccgttggcgcctcgatcccgcccgacgtcgtgaccggcggtattctcggcgtggcgttcgccattacctctggcgcaggcacagaaacggcgttgttgcttggcctgcctatcgccacgctgactttgatcctgaaaaacatctatctggggatgttcattccaatgcttagccagaaggcggacgggtatgcggaacgggcggatctccgcggcattgagcggatgcatttgattgccggattcggcctgtcgctgatgcttgccgcggtggtcaccgtctcattcctggtgggcagcaacgcggtgaaatccctgctcgatacgatcccggaatttatcaaacatgggctcagcgtcgccaccggcatcatcccggccctcggcttcgcgatgctcgccaggctgctgattaacaagaaagtggcgccgtattttttcctcggttttgtgctgatggcctatttgaaaatcccggtgaccggtatcgccattctcggcgccatcgtggcggtggtcatggttaacgtcaccgcgttgaattcacctcgtacgacgacagaacaaggagtcagcgatgacgacgaagatgatttctgaagagaccctgcagccgcaggcgcaggaagaaacccggattacgccgcgcgatttacgccgggtgttctggcgctctttccagatggagttctcgtggaactatgagcggcagatgaatctcgcctttgtttacgcgttgatcccggtgctgaagaagctctatccgcgcagagaggatctggccgcagcgctgaagcggcatctggtttttttcaataccacgccgcatatcgtcaccctgctgctggggatcaccacggcgatggaagagaaaaacagtcagcagaaaaacatggatgccactgcgattgataacgtcaaagcctcactgatgggaccgttagccgggctgggtgactctttcttttgggggacgctgcgcctcatcgccaccgggatcggcaccagcctggcgctgaagggcaacatcctcgggccgatcctgtttctgctggtatttaacgtgccgcacattctggtgcgctggtgttttacccgctggggctacgtactgggcaccggggtcctgcagcggatccagaagagcggaatgatggagagcctgacctacggggcgtcgattatcggtctgatggtagtcggggcgatgaccgcttcaatgatcgatatcaccattcctctctccttcggcgccggggaggccaaaacccaggtacaggacattatcaacgacattctgccctgcatgctgccgttggtgagttttggcatcgtctactggctactgggacggaaagttaaaccgctctcaattattggcggcatggcgctggtgggcattctgggttcgtggatcggattgttttaacgggagtgagctatgcgaccaacaatgatgacatatatcagtgaagagccggcctgcctggcgcagatcctgcgcgactaccggcaaaagctggcgccgattgaaaccttcgtccgccagcacccggtacggcgaatattattgctcgcgaccggatcgtcgctgaatgccgcgctgtgcgcgcgctatttctttgagcaacgcttcggtgtgctgcttgacattaaagagccgtacaacttcacccattacgacgcgatcgacccgcatgccgatctggtggtggcgatttcacagagcggaaaaagcgcgtcgacgctggaggcgatgcgtaaggtacaggcttccggcaagtcggttttcgccctgacctcagatccgcaaagcccgataggaggcgccagcgatggcgttctggatattaataccgggatcgagagcgtagggtttgtgacccgcggctttagcgcgacggtgctcaacctgttgctgatagcgctgatcattgctcgtaagcaggagaaagccagcgaggtcgaggagcagcactatctcgctgaattgcagcggctggtagcggcgatcccggaggttatcgtccgcacctcgcgctttattgaccgccatagcgaaacgctgcgcagcggcgagcgctttgtcgccaccggctacggcgcgctggttggcgtggcgaaggagttcgaaaccaaatttaccgagacggtgcgcgtgccttccagcggctttgagctggaagcctatatgcatggcccctatctggaagccaatgcccgccatgtgatgctgtttattgaagatacgccggacgcgcgaacccgggcgctgcgcgactatctggcgccgtccattggccgggcctttaccctgacgctgggtgacgaagaggatgctcaaacgctggcgctaaactgtccgtgcgagcatcacctggcgcctctgctgctgattgtcccagtgcagatgctcgcctggcataccgcaggactgaaaggcatcgatctggctaaacgtattttcgacgattttgaccgcgtcttaaaaagtaaaatctgaatattcaggagaaaactatgttgggttttaatcaggacgagtacctgaccagtgctcgcgagatcatcgctgcgcgtaaacaggctgaaaccgtagccgacgatatttatgacagcggctgtagcgcattattttttgcttcggtaggtggttccctggcgccgatgatggcaattaatgaatttgccaaggaattaaccagcgtgccggtatatcttgaacaggccgcggagttaatccatcgcggacataaaaaattaaataaagatgcggttgtcgttacgttatctaaatccggcgataccaaagagtcggtcgccattgccgaatggtgcaaggcacaggggatccgcgtggtagctattactcgtcacgccgactcgccattggctgccgccgccagctggcatattccgatgtgccacaaaaatggcgtggaatatgaatatatgctgctgtactggttattcttccgcgtcatttttcgtcacggcgagtttgctgattatgcgcgatttgccagccagctcgagttactgccggaaaatctcctgcaggcgaaacgccagttcgatccccgagcggatagcattgccgcgcaataccatgactgcgactatatgatgtggattggcggcgcggaaatgtggggcgaggtctatctgttctcaatgtgtattctcgaagagatgcagtggaagcggacgaagtcggtgagctccgctgaatttttccacggcaccctggagctgctggaaaaagaggttccgctgtttctggtgaaaggcgaggggagatgccgggcgctggacgaacgcgtcgagcgttttgccgaaaaaataactgaccatctggtggttatcgacccgcgcgactatccgctgaacggcattgatgacgcgttccgctgggttatggcgccgtgcgtggtgtccaccctgctggtggaccggctggcggcccactttgaacaccataccggccacgacctcaatatccgccgttactaccggcagtttgattactaagccgtgttgatggcggccagccgggctggccgccatgctattctccgaggcgcttcccagaaaattgtcgtcaaacccaaccgggtaaaaaccggtgatagagtccggcttaccttctctttcaggcaagcggatggccatgaaaaaacggatgacctcgacgccgcacgatgcggtctttaagcgatttcttcgtcacccggagacagcgattgatttcctcaccctctaccttcccgaagcgatccttcagcggtgcgatttctctaccctgaggctgcaatcggcgagctttatcgatgaggatctgcgcgcctggtattcagatgtcctctggtcggtgcagaccacctgcggcacggggtatgtttacgtggtgatagagcaccagagctcaccggatagccatatggcctttcgcctgatgcgctatgcgattgccgcaatgcagcgccacctggatgccgggcacaaaacgctgccgctggtggtgccgatgcttttttatcacggtgcaaccagtccgtatcctttttccctcaactggctggatgaatttgccgacccgcagctggcgaagacgctgtatggctgtccgtttccattgatcgacgtgacggtgatgccggacgatgacatcgtgcaacatcggcgagtcgccttgctggagctgatgcaaaaacatattcgccagcgcgatctcagcggcataacggagtcgttggcggccgttgtgatgctgggatacactaaccgtcggcagttgagaatgctgtttcactatatgctgcagtacggtaatacggccgagccgggcgtgtttctccgccggctggcccgccgtctgccacagtatgaggagacattgatgtctatcgcgcaaaagcttaagcaggaaggtcgggaagaaggccgggaagaagggcacctggagggcttgcaggaaggcagccgacgcgaggcgctgcgcattgccggcagtatgttacagaatggcctcgacaaagagatggtacaggagatcaccggactgtcggctgatgaactacagccgctgtgtggttaacgtcctgccacgacaaccgctgcccggcgcgaaaattcgccgggcaggattgcgttagccttcgcttttcaccactttgatctccaccatgccgatccccaactgacgcggggagtggccgaggatattaccctcgttagtggtttgcgggtccggcggggtgatgatcagcgtgttgctgcgcgttgggttgtcaaaatgcagcgtcgtggtagtcacgtcattatccagagtgagcacttgctcactttctccaactcgcaccggaattggcttattggcgtttgggccataagctttggcggtgatcaccagatcaaatttctccggcagcggctctttatattcaatcttcacgtcgctgcccaactgagcattggaccaccgcccccacgactcgggacgcgaaataccgctgaactgtttaacctcttccggggcgccagcgacgttaaacacgaagctgtcggccttatagcgaatatcgttgtcgacaattttcagcgtatcgacgttgcccttatagcgctccatatcgataagggtgtccctgaaggcggtcttgccgtgccactgcggcttatcaacgtgctggaccttctgctcaccccccagctgtccctgcgagacgcaccagtcggtggagagcgccagctcaggcgaccacagctggcccattttatagcagcgatcgacccacacgaaattatcccgtggcgcgaaatcggccagctggaagcgcagcggcgcagagtattcactctccggcagcggttctacgcgctggtcagatacccgcagcagcagcggcagacggaaatggctgccggagaaagcgatcatatttttctgcgagtcgatggtgaaattcttcatttctttggggaaattccacaggcggatcacgtcaggcttccatgccaggactttctctttcatattcatgaaaataccggagagcgactggccggagaggctgctacgcccgaggccgatatagttatcgccgccgagaatatccagcaccgtcgcgccgttatccatggtgttgcgtttcaccgccagggtctcctgctgcggtttatcgccgcgcaggacgaagaacagattgctgcgatcgtgcttgttgagataatcccaggcgctgttcttcatggccaggtgatcggaagagaccacgatgaccgtgtttttgaaatagggtgaggctttaatcttctctatcagcgcggcgatatgttcctgactgcagctaacggcgctgaaagagaggtttttcttgccgtccacatcatagcgtttacgctcgcaggtgcgtgagataaaaccgtcgggatggtgggtatccaccgtcagggcgaagagcgagaagcgtttcccggactgcgacagctcttcgaattttttccaggtctcgtcgagcacagtgtcgtcatagaagccccagtcgttgcggtaggtaggatccgccaccgtagtttttagctcttccgccccgtacagatgatcgaagccgtgggatttaagaaacacgtctttgccggcaaagcgcaggttagccccctgcacaaagtaattctcgtaaccggagttcttcagaatatcgccaaggcaaatattctgtggaaagaagctggagactgaggctgaggcattaccttcgaacggcgcgaacagcggaatgccgcactgtgaggcgaccatgccggcgatagtgtaatcggtccccggcagctgcatggtattgctgaaatcaatggcctcagctttaattctgccaagctcaggggtgaggttggggaaggcgtcgttatcaaaataggtgcgctcgagactttcgccatagatatagaccaggttcagctgcggattgtcgatttgcttcgacggctctttatagtacgcggcaaagtctggatcgccctcgcgtgactgggatttcaccagctcgctgatctgatggaaggccgggctggcatcaacggaggccagcgccagcagtagcgccgccaggctgtaaccgacgtgatgaggatgatgccgacggcggcgcagcacccagccgagggcgccaaagacggcgaccagtgcgacggccacgccgacccccggcagtatatatttgccgatcccggcgccggtcaggctgttggtcagagtgtagagtaccgcgtcgttgatgccgtcgccggtgaagtagtcactggcgtagagggtgatattcagcaccacgaacaggcctaacaccgtgagcgtggcggcaaaccaccaggtgttacgacccgctttccaggcatacagcaccaccgaagctaaaaataaggcgatggataacaactctgacacagctcatcctcattaatgccagttatcggctggcagaacagattacttttcaagccccactgtaattgcagcgccatcttgctgcaattctagcgtcatgaaagtgtgcagttattcagaattggtttagaagttgccttttttgatcggcatcgcatcgggcgaaatgggaaaacgaaacaggaaaactgcaaaaaaaagcgtttcaggccgcggcgccgccgcgaaggcaacaaatgcggccttgtcagtcaggatcaggagaggaaattaacaccctgttttaagaccagatcgcaggctttggtttttacctgtttcgccagcgagctattgccgagcgtattcaggtccaactgctggccgtttttgctgttgagcagcccctgcaggccatccagatagctggtgtcctgtttttgtttttccggcgtgctaagccccagtttatccagcacctgatttttgacgttatcggcgctggtcacggaggccagcttctgtttcgcgcaatatgacaggatcccggccgcattattcatgctgctggcggtcagggattggctgctgccgttaagcaggctggttagcgaggagacggacatgccgccgctggcctgggcgttactgccgctgagctggctggcagcgctgttaagggaatcctgccaggaggcggcgtgggcgccagagagggtaaacgcgctaacggcaagcgcggcaacaacgctatttttaaacgatttcatagacggactcataagcgtgactgaataatcgctttagtataacgccgtcgtcgcccggaaatctcttaatactccttgcctgtaacgcggtgccggtaactttcccaattgaagataacccacaggctgttgccgagccgcatacggtccatcacccgctcgccgagcagtttgttcatctcttccatattgctgttggtgagcatcccggtaggtcgtttggaggatgagcgccggtcaactatctgattgataatgaccttttcatagcgagactccgtctgcataccaatttcatcgatcaccagcaggtcgactatgctgaggtcgttaagcaactgttcttcgctcgtttcccggttgccgaaggtatctttcatcgccgacataatatcggccacggtgatgattaagaccgacttcccgcgcagcagcagctcgttgcaaatggctgccgccaggtggtttttgccagtgcccggtttaccggagaagataaagctggcgatattgccatcgaactcttccacgtactggcgcgcccgggcgagcgcattcatctgcccctcgcactcgacgcgatagttatcaaaggagcagttctgatgcagcgggcggatccccgagcggttgaaggtgcgctgcattttcatcgcgcgattctctcgctccagcgcttcggaacgcagccggccttgctctttttgccaggccagcagctcttcgccggttttaaacgccggttcaatatgtgccggcatcattttctgcaggcgtttcatcaggtcgccaacgtttttcatgctcatcctcggaaacctcgcggaatatggctgtcgggttcgctaacgctgttcacatcgcgcttcggctgtccgccgttgctggcgcggctgatttgcacgctacgcgccagcttctgctgccactgcacgtggtgaaagactttaccttccgcctgccagtaagcgacgaaagcggccagctcttcgggggtaaccggctggctcagggcaatgccccacagcgcggccaggcgctgaaaatcggcgtcaggctgccatccggcgtacatagcaaatttgcccatcggcaccgcaaccggcgccgcggcgggctcctcgaaaaactgcgggtcaagcgcgatgtcgctgccggggcgcgccagcctggcttccagctccagcagttgcgccagccgcgctggcgtcagcgcatagaatgccggcgcgttattggcaaaaacggcaacggtgccgtcagtcgattttgccagcagcgccgcgtgctgctggaggaactcttccaggccgctaaaatgggaggttaaaattcgcgaagacataactctatctcaactctgaactgcaaagagtggggtgatctgcacatagtagcacagaggccatcgcggaaggagcgtcgcgggttaaccgcgacgtcggggttagacgcgaggacgcttacgatacagccacaggccgggtatcgacaggccaatcgaaagggcgcccacaatcgaagaggcctttaaaaaattgctcagcagcaaaatcatcatctcttccgaatagccaaaatgactgatttttaccgcggaaatcatcgccgtgtaggctgagatgccaggaaacatcgggatcacggcggcgacggtaaaaatcttcggatgcgccagataccagcgcgaccattgaatgccaatgctgcccaccagcagagcggcgagaaaggtggcccattcaatgttaaaaccggcgctcatcatgatcatacgcgagccatggccaatcgcccccagcagcgcgcaccagcgcagagcgcgctgagggacattaaagaccatcgcaaacccgacggcggggatcgccgccagcagcatgtcttccgccagcgcaaaaataaatgagattatgcccatccgcgcagcccccatacggtcatggccatcaccacgccaatgcaggtggctagggttagcaggctggcgatcgcccagcgggcgagtccggtattgatatgccctttaaacatatcggcgacggcattgattaatggaaaacccgggaccagcagcaggacgctggcggccatggcaatggtcggcgtgctggcaaacgccgggaggcgcagcagcagcccggagatggtggtggcgacaaaggcggtgatgcagaagttgatctgcggatgcatggagcgatgggtcagcacctggcgaatgtacatggctaccgtgctggcgcagaagctgaccagcgccccatcccaaccgccgttattcagtttgcagaaacaggcgcaggaaagacccaccatcagcaccagcagccagcgcggatagcgcaggggaacgatctgcgcaaaacgcttctcgacgtcgcgatagtccagcagcttatgctcggcgaggatcacaatgtgctgcacttccgtcaccacatgcatattaatgccgcgatcgacatttttgcgcgtagaggtaagacattcgccatttttaatggtggtcaggacgatggcattcgaagagatggcgctttcaacgctgtccatccccaacgccagcccgagacgtgttgacagttcctccaccagcgcactctcggcgccgtgctgtaacagaaaaagaccacactggatgcataaacgtgtgattgcccgctgctgtgtccgatcaacctgcatacttcctctattgtccacgacgcctggtatctgccgatactttaacctgaagcgcagtggcggctgaggggggtgggatcaaataatgtgcaaaaattcccagtctgcggggcggcagaatttgaagcatcccacacttttgccagtttggtgaaaagtgcaatttttgtcgccattcatcccttctttttccccactgacttatcaaaaatgcagaaaagcacttttattaaacaaaaattatacaaataattaaccctgcaagagtgagacatccctatgaagacacaggtcgcgattattggcgcgggcccctccgggctgctgctggggcagttgctgcacaacgccgggatccataccgtgatccttgagcgtcaaacgccgcagtatgtgctggggcgcatccgcgcgggaattctggaaagcggtaccgttgatctgctgcgcgaagcgggcgtggcgcagcggatggatgccgaaggcctggtgcatcatggggtggagtttctgtttgacggccagcgggtgcccgtcgcactgagcgagctaaccgacggtaagagcgtaatggtttatggccagaccgaagtcacccgcgatctgatggctgcccgggccgccagcggcgcgccgatcgtctatggcgtgagcgaggtggctatccatgacgccaaaagcgaccggccgacgatcacctacctcagcgaaggggaaacctgccgtctggagtgcgattttattgccggttgcgacggtttccacggcgtatcgcggcaaagtattccagctggcattttgcagacctacgagagcgtgtggccgtttggctggctaggcctgctggcggatacgccgccggtcaatccggagcttatttatgcgcaccatcagcgggggtttgtattgtgcagtcaacgctcactgacccgcagccgctattatctgcaggttccgctgagcgataaggttgaagcatggtcggacgagcgcttctggcaggagctgaaaagccgcttgccggaggagctggcatccaggttagtgactggtcactcacttgagaagagcattgcccccctgcgtagcttcgtcgtggagccgatgcaatatgggcggttgttcctggtgggggatgcggcgcatatcgttccgccaaccggggcgaaaggattaaatctggcggcatcggacgtgaactatctgtggcggattctgcgcgaatactaccatcgtggccgcagcgatctgctggcggcctactcgcaactggcgctggatcgggtctggaaaggggaacgctttagctggtttatgacccgcctgctgcatgattttccggatcagaacgcgttcgacgctaaaatgcaggccgccgaccgccgctactatctgggctcgcgcgccgggctgaccaccatcgcggaaaactacgtgggcttgcccatggagcgtgtcgcctgaattaagaggagtcatcatgccgttcgttcaaaccgtgcccgtatttaagctgtatggcgaagagtgcggctggccgacgccggacctgctgcactgtgagtcgattttacagcgcagcagcctgtatcagtggcatattcgcgtccatcagcatgcggaaatggtccagcttctctatctgcatcaggggcgggcggagatcgaaattgaaggcgccaccgcggtgatgacggagtcctgcatccaggtggttcccgccctctgtattcacgggtttaatttttcacccgggacgcaagggtttgtgctctctctggcgctgccgctgctgagccggtttgaaaatcagttcggtcgccctctggatgtgcttagcgtgccgcagtgtgtgccggtgggccgttctcgcgggcgcatgcatacgctgttttcagcgcttcgcgaggagtactgcgaagagcacgatgcgcgagaaatgatgctctattcgctgctggggacgctgttggtctggctgaaccgacagtgccatcccgcgtcccccgcggaagataaagcggagcggaagcgcagcatgatgcgccacttcgcccgccttatcgagagccactaccgacagcatctcccgttggcggagtatgcgaagctgattggactgtcggttacgcacttaaattatttatgtcgtgagttttatggctgtagcgctcttggagtattgcatcagcggttgatgcttgaagcgcgacgcaatctgcagtacacccgcatgacgattacacaactctctgattatttggggtttagcgacgcagcctatttttcgcgttttttccgtcgctatagcggtatgtcacccaaagcatttagagaaacaattaaagataatgcttcataatgttcagtactgaaattatttttgctaaataatgtttttatcttttctaatttattagcgcaggaacgtctgtgttaatattaatcgcaagtatacacggcaataatattttacacggtatgaccacggttcggtcgttacgtatatcgtgtgcgcaggccatgaatatgattttaatattcatccaggaaatgatatggcgataaagtcgctcgccgatcgtttgcaggcaagcgaaggaacttcgacaggaagcggaggtgttatgttaccaggacaaggtaagtttggcgtcgttattagtaaaattcccgtcatgcaatcagggttaaaggtgatcttcaatgagaacctccctgattacgagctgagtttttgtcgttctcatgatgagctcacccttttacaactgcggcgggcggtgctggttgtcgcggatatctccggcgagattgcgcacccccgagccgtctgcgagcgttattactccctcatgacccagtaccgtgatattcactgggtttttatggtcagcgacagcctctatccgttggccgttgagctattaattcgtcctgaaagctcgttgatctccgagagcgagccggttaaccggctgattgaggtgatttgcgccggtagccgtgcggctgaacagattagccgtacgctgtttgccgggtatgaggacagcgatttcgcaagctaccactctgcggcgatgctcactctttcagagcgtaaagttctgcgccttctggcgaaggggtggggaataaaccagatcgccgcgctgttgaaaaagagtaataagacgatcagcgcgcagaaaaacagcgcaatgcgtcgcttatctctacgcagcaacgctgaaatgtatgcctggatcaacagcgcgcagggaatgcaagagctgaatatcaattcagcttacggggagcaaatggaatggaaaaaaatagtacaacccgccatgtcgccatcgtagaaaaatgcgtgatgacggaaatggcatggcgctatatctttagtcgtgaagataatcgccgttatcatattcatctgtttaaaaatgtcagtatgctcagagcggcggaaataccgtttccctggtcaaccattattttttctctttcgggaagtcgttcttcacgagccgagagtctgctctttgttcatgaaatggcgcggtgccggccggaagtccaaacgattattctggctaataatgaaagtgaaatgcacctgatcggccatcttatgccggcctgtttgcacggcatactgaataaatccgcgccgcgacgcgggctacaggagcgtttgctgcagctactggacaatcatcatctcagcggcagcgaacaattttgcgacagagaggcgtgcaacgatccgctaagcccgacggagcacgccatccttcggtatatgtcgtggggatattcgctttctgatattgcgatacagctcaaccggaatattaaaacgatccgcgcgcataagtttaacgccatgaccaagctcggagttcgctcagacattggtttattaaacgcggcggatatcctgttgcatttaccgctcaatagtacgaccagcgccgttaaacaggtagcgtaatgcggctataaacacacatctacccatgttgcatcggtgagctgcgccatgcgttctggttcaatgcgaaccgcgctatggatggctcccgctgcgggtagtacttcctgataatgtctgagagagacgtcgcagtagactgccagcggattttccagaccaaacgggcaaacgccgccgaccggatgaccggtccaggtaaccacttcatcgctgcttagcatgcgtgctttcgcgccaaaggtctctttcagctttttattatccagccgcgcatcgcccctggcgacgatcagtacaatcttatctttgatcttgagcgacagcgttttggcaatttgccccggctcaacgttgtgtgcggcagcggcaagtgcgacggtggcggtactctgatttaactcaataatttcgatatcgggggcgtgttcggcaaaaaactgccgtacagactgcagactcattggattctcctgatttaagcctggttaaatctgtcacaagcctggcggagtgtaaatatcagcgcggacaatccagattctttctattttgtcgatctccttcacaatcgccgtaaccggttactgtaaccggttgcggttatctgcattgagatgaatactggaacagtcacttctccttttatttataaaaaaagagccgtgtatgaatcgttgcctcatgagcagtatagccggttgcacatccgccagcggcctgctgcgtcaaaaagcggtcatcgtaacggcagggtaatcgttgttgggccagtatcaatagcctgtcaggagggctactatgtctgctaaccatgctgcgtttaatttgatatttcgctttgtagaaaattacataagccccatagcagggcggatctcgtcgcagcgccacgtcatggctatccgtgacggatttatctcagcgatgccgtttatgatcgtcggatcgttcctgttagtgtttgcttatccaccgttctcaccggataccacctggggttttgcccgcgcctggctggatctggcgaaagagtttgaggggcgtattctgaccccctttgatatgacgatggggattatgtcgatctacatttgcgcggcaatctcctataacctcggtaagcattacgagaaatccaatcagctcgatccctttatgtgcgcaatgctgtcgatcatggcctttttgctgattgccgcgccgaaaaccaatggcacgctgccggtggatagcctcggggggaccgggatctttaccgccattctggtggcgatctactgcgtggagatgatgcgtttcttgaaagcgcacaacattgggatccgcttgccggaccaggttccgccgatgatcaaaaactcgtttgatctgttgatcccggtgctggtggtcgtgctgacgctctatccgctgagcctgtttatccagcaccattttgacatgctgatcccgcaggccattatggccattttcaagccgctggtttcggcagccgactctctgccggcaattctgttggcggtgctgatcggccacctgctgtggtttgccgggatccacggtgcggcgatcgtgtccgggatgctgcagatgttctggctgactaacctcggtatgaaccagcaggcgctggcccagggcgcgcctctgccgcatatctttatggaggcgttctggaccttctttatcgtggtcggaggttccggggcgaccatgggactggtgttctgttatctgcgcagccgttcagcgcatttgcgctccattggtcgtttgagcgtggtgccaagcctgttcaatatcaacgagccggtgatctttgggacgcctatcgtcatgaacccagtgttctttattccgttcctgctggcgccgatggtgaacgcggtactggcctgggcggcaatgaagctggatctgattggccgcgtcatctccgtcgtaccatggacggcgccggcgccaattggcggcgcctgggcgctgggctgggatttccgggcggcgattctggtcattgttctggcctgcgtgtcggcaatcatctacttcccattctttaaggtatatgagaaacagctgcttgctcaggaagcggaagaggccgagcgggcggagcaggagagtcaacagaccgcataaatagcaacgggcggtaaaggccgcccgttacttttcaggtaagtggtaattatttaagcgtacagtcgccgcactgttggacatccggcaggcgatagcgctgacagcaggtgcgtcggactaactgcccttcacgcagcatcaccgttcgccacagcgggttatcctggccatcggcgagttgtttttcaaaaaaacagtgctgacgtagcgcggcaagccgctcatcacccagcagcgcgcgcatttccccaagataccagttaatcagatagccggtattgctccagataagtttgctattgatttcgcccgtcgctgccagcgcctcaacaaccggctgcagggtgcgcgttaccagggcatccattcgcgcctgcggtgaaagcctctcgatgtcggcatcgctatgcacatcaatccagaagcaggccgcccggccgctttcatgaaattcgacatggaaatgttctggcgccaggctgaggccttgcggttcattgagcagcgccagcatcagcggcggcaccagcagaccgatataccattgcgcccagagcgagagcagaggcttctgttcccgaggcagcgtcggctgatgacgatagatatgatcggaccaggtggccagcagggagcgcaaggcgatgggttgcgaccattcggcaagcgttaacgcgtgccgtggggcgggttcgtcaagtcgcaggaaatcaagcaggtgtggacgcagggtggcgattttttcccgaatactctccgccagggcatgctcagccgtcggcaaaggagcccgccagataagttcatcgctgagaggaagggaacgccaggccattcgatttccagatacaaatctaaatgataatgattactgatattagttgcttgcaggcggcatggcaaggcttttatcggcgccgcgatgtcgcagcgcgcgcaggtcaactggcaagaataatgttgcggcctttattttttgcctcatagagtgcgccgtcggcgcgcgccagcgcttgttcaatgttgtcattaatgagcggcgtcaggccaatactgatggtgacgttggtggcgacgctttcattaaacatatgcgggatcttcaggtcatagacccgctgacgtatacgttcggctgtcttccaggccgtttcttcgctgctattggtcagcagcaccataaactcctctccaccaaagcgggcgacaatatcgcgtgagcgtacagcgttgcgaatggcagcagagacgcgaataagcgcctggtcacctatcatatgaccatagtgatcgttataggccttgaagtgatcgatatcgaggagcagcacgtagtggttgtcgccgtccagcgccagcagggtatcgaggcggttctgcagtccgcggcgattatacaaaccggtcaggggatcgagcatactgagatcgttgagcgtattgcgttcatgcatcagtttatccattaaaccctgcgtaaaggcatcgctgcgcttctggataatattttgcagggtaataccggctataggcagcataaagcagtaagtcatacgcaaccattgttccccctccgccattatcaggcaggcaaggaaagttggtaaagagtggagggtaaaggcagtgatattattggaaaaagcgatggtgccgataaacagaatgcttaatagggcgatcaccagatagttaaaatgcggcggtgtcaatagcatcgcttttgtcactacgtgccatgcccatagcatgccaaataacaacgagatagtgggaatatttattttcgattgcggccatttccagtgccagagcagcagcagcccgctgcagacgacgatcagggcgcagggcagcgtaaaacgaactaccgtaaataggggggtgaccagcgacagcgaggaagaaatgaaatttagcagtaaaaaaagccgtaaggaatattgatatttttgtgcgtaatgtgctcgccaggtttgtgcagtcatatcggaagaatcattattagtcgttaaatttcaaaatgatgaaagccaaaaatgaagagtctgataacaatgtgcaaaaaaaggttatttgcaaaataagcaaaatatttaatatatatcgataatccgcttaatttatcaccttcatgaatgtatgtcattaccgcgaacgtaaagaaaaaggggcagagcacgtcgcaaatgacaaatgataaagattatcatatgatattggttatcattatcgttgtgagaggtgaaaccatgctgcagcgagcattaggaagcggctggggagtgatgattcccggcgcgctaattgtcgctctcgggtatgccggagtgtcggctgacgtatggcgggtactggtcgcggtgggcatgctgatgtccgcggcgatgatctggcatcgtcaattgcgccattttatcctgctgccatcgtgtgtcgcgttgatcggcggaataatgctgatgattgtggatattaaactgagaggataatgccgggagagggaagaatattggtgcgaggggggggacttgaacccccacgtccgtaaggacactaacacctgaagctagcgcgtctaccaattccgccaccttcgcacagtattctttctttgggatattgcctcgttggtgcgaggggggggacttgaacccccacgtccgtaaggacactaacacctgaagctagcgcgtctaccaattccgccaccttcgcccagtgcgagcaatatcttcgtggattatggtgcgaggggggggacttgaacccccacgtccgtaaggacactaacacctgaagctagcgcgtctaccaattccgccaccttcgcataccatcgatactctgaaagtatcgttaccacggaggcgcattctagtggttttcggcgacacgtcaatagttaattatgcaggttgtatcgattgctgcaaaaatgggcggatttgcccgcgggaagcgccagcggtaccaggagcgggccgccggcgtgaaaagacgattattttttcgcctgacgggtcataatggtgcgatagaccttaaagcgcccggtctgggcgatcacctcatggaagccgaacgtctcatccagcacctgcggatacggcaggaaggcgttggcgacaatgcgcagctcgccgccgctgttcagatggcgaaccgcgccgcggatcagcgcctgggcggcttcgagactggtctgcaggccgtcatggaatggcgggttggagatgatcatgtcgaagcgaccattgacctcggagaagacgttgctggcaaacacatcgccagccaggccgttggcggcaagcgtcgcgcggctggcttcaaccgccggggcgctgacgtcgcacagggtgaggcgcactttcggtgaatggctggccagcgcggcggccagcacgcccgcgccgcagccgacgtccagcactttccctttggtatgcggctcgagggtggagagcagcagctggctgccgacgtccagaccgtcgcggctgaagacgcccggcagggtttttatcgtcagattatccagtgtgtattcgccccagaatgcgtcggcgtcgaaggtcggctgcttttccagacggccatgatagaggccacagcggcgggcgctatccactttgtttaatggcgcgtattcagccagcatctgctccgcgctgcggacgccgctgcggttttcaccgacgacgaaaatgtcgcttcccaccggcagcagagagagcaggttcatcagctggaactgcgcctctggtttgttctttggccagtagtagatcagggtgtcgcattcggcgacgtcagcggcctcagccactaagctaaaacggacggtgtcacccatctggcggttgaggacctgccagtggtggaactgttgggtatgggcgcggctggccgcggtatccagacgcgcaggcaggtcatcctgcaggtcaccggcaaacagaacgcgggcggactcgaaatcatcactgtggcgcagcaagacttcacttgccggggtaaaagcggacatgaaacactccttcattaagactggcgccgattatagtagtttgttggcgcagatacgacggatttgctatattgcgcgcttgtttaacaggagtgtttcgctatgacatcccgacgagactggcaattacagcagctgggcattacccagtggtcgctgcgccgaccgggggcgttgcagggcgaaatcgctatctcgcttcctgaccatattcgtctggtgatggtggcggaaaccccgccgtcgctgacagagccgctgattggcgacatattacgcgcgctggccgtgacgccagatcaggtcctgcagctgaccccggagcgggtggcgatgctgccgcaggacagccgctgcaacagctggcggttgggcacagaggcgtcgctgccgctggcgggcgcccaggtgtccacccccgcttttgatgaactccagaccagcgcgccggctcgcagggcgctctggcaacaaatctgcgcacatgaacacgatttctaccctcagcacggctgatttaaccagagcctggcacatcgaaaaacgcgcccacgctttcccgtggagcgaacagactctggccagtaaccagggggagcgctatcgcaactatcagctatcggtagatggcgaaatggcggctttcgccattacgcaagtggtgctggatgaggcgacgctgttcaatatcgccgtcgatcccgcgtaccagcgccgcggcctggggcgagcgctgctggagcatgtcattgatgaagtcgaaaaactcggcgtcgtcacgctgtggctggaggtgcgagcatccaacgttgccgccatcgcgctgtatgagagcgtaggtttcaatgaggcaaccatccgccgcaactactatcctacggccgacggacgcgaagacgccattattatggctctgccaatcagtatgtaacacaaggtgatacgatgaaatgggactggattttctttgatgccgatgaaacgctgtttacgtttgattctttcagcggcttgcagcggatgtttctcgactacagcgtgacctttaccgccgaagattttcaggactatcaggccgtgaacaagccgctatgggtggattaccaaaacggcgccatcacctcgctgcagctgcagcaccagcgttttgacagctgggcggaacgtttgaatgtgccgcccggggaactcaacgacgcgtttatgaatgcgatggcggaaatctgtgccccgttgccgggcgcggtctcgctgctcaacgcgctgcagggcaaggtcagaatgggcatcatcaccaacggctttacctcgctgcagcagactcgtctggagcggacaggtttacgcgatcactttgatttgctgattatttctgaacaggtgggtgtcgccaagccggacgcgcgtattttcgattatgcgctggcgcaggcgggtaacccaccgcgctcgcgggtgctgatggtcggtgataccgccgagtcggatattcgcggcggcgtgaacgccggactggcgacctgctggctcaatgcgcatcagcgcgagctgccggcggatctcgagccggactggacggtgacctcgttaagcgaactggagcagctcctgtgtaaacactgattgcctcccccccgttgatgggtaaaatagccgcaatttttcgtattccacatgcgtggcccatggccgcgtttacttagaagattaattatgacgttgtctccttatctgcaagaggtggccaaacgccgcacttttgccattatttctcacccggatgccggtaagaccactatcaccgaaaaggtgctgctgttcggacaggcgattcagaccgccggtacagtaaaaggtcgtggttccagccagcacgcgaaatccgactggatggagatggaaaagcagcgtggtatctcgatcaccacctcggtaatgcagttcccgtatcatgactgcctggtgaacctgctggataccccggggcacgaagacttctccgaagatacctaccgtaccctgacggcggtggactgctgcctgatggtgattgacgcggcaaaaggcgtcgaagatcggacccgtaagctgatggaagtcacccgtctgcgcgatacgccgatcctcacctttatgaacaaactcgaccgtgatatccgcgatccgatggagctgctggatgaagtcgagaacgagctgaaaatcggctgcgcgccgattacctggcctatcggctgcggcaagctgttcaaaggcgtttatcatctctacaaagacgaaacctacctgtatcagaccggtaaaggccacaccatccaggaagtgcgtatcgtgaaggggctcaacaacccggatctcgacgcggcggtgggggaagacctggcgcagcagctgcgtgacgagctggagctggtgcagggggcgtcgaacgagttcgataaagatctgttcctggccggggaaatcaccccggtcttcttcggaaccgcgttaggtaacttcggcgttgaccatatgctggatggcctggtggagtgggccccggcgccgatgccgcgcaacaccgacacgcgtgaagtcaccgccacggaagagaaattcaccggcttcgtgtttaaaattcaggccaacatggatccgaaacaccgcgaccgcgtggctttcatgcgggtggtgtccggcaaatatgaaaaaggcatgaagctgcgtcaggtgcgtatcggcaaggacgtagtgatttccgacgcgctgacctttatggcgggcgatcgctcgcacgttgaagaagcgtacccaggcgatatcatcggcctgcataaccacggcaccattcagattggcgatacctttacccagggcgagatgatgaagttcaccggtattccgaacttcgcgccggaactgttccgtcgtattcgcctgaaggatccgctgaagcagaaacagctgctgaaagggctggttcagctctctgaagagggcgcggtccaggtcttccgcccgatcgctaataacgatctgatcgttggcgccgtcggcgtgctgcagtttgacgtggtggtagcgcgtctgaaaagcgaatacaacgtggaagcgatttacgaatcggtcaacgtggccaccgcgcgctgggttgaatctactgacgtgaagaagttcgaagagttcaagcggaaaaatgaagttcagctggcgctggatggcggcgataacctgacctacatcgccccgacaatggtcaacctgaacctgacgcaggagcgttaccctgacgtggtgttccgcaaaacgcgcgagcactaatccctgacgaagcgcggcgcaggccgcgcttttttctggttacgctcccgttcccttccttctggaaagttcttaaaacaccgctaattcgtctgttttttatccatatcctccgcaaccccttcgtctgtctactatatttaattcgtgtttttaaaaatgctggcgtaattcactgcgataagacgccagcgctggtgaaaaaacgaggacataacgatgaccagactaaagaatgccaatatgttgctggcgctcttcttaggcttagccgcgttgaacgcctcggcagagacggaaaaaacaacggtagacagtgcgaagtcggctgccagcaatgcgggagaggcggtagataattcgattaacaaagtcggcgattttatggatgacagtaccattaccgcacgggtaaaagcggcgctgatcgaccataaagatattaactccggcgatatttcggtgaaaacggagaataaagtggtcaccctcagcggcgacgtcaccagtgctgaacagaaaagtcaggcactgagcgtagcgaaagaggtcaaaggcgtctcacacgttaacgacaagctgacggtccatcataaatcatcgagcgagacggcgacgctgaaaggctatgccggggataccgccattaccagcgaagtgaaagccaagctgctggcggatgacattgtcccttcgcgcaatgtgaaagtcgaaaccaacgccggcgcggtacatctgaccggtacggtggcttccgcggcgcaggcggagcgtgccgcagagattgcgaaagcggtctccggtgtgaaaagcgtgcgcaacgatcttagcgttaagtaaaccgagttattaacaaaagtgttgtctggccaaggttgccgaacgaatagcagcatccactgagcgatgagctatacagaaagggtgcgcaaaccgctgttcaccgtccattatggtaaggagaaaagtatgtttcgatggggaattatttttctggtcattgcattaattgctgcggctctgggctttggtggtctggcgggtacggccgctggcgctgcgaaaatcgtctttgtcgtcgggattatcctgttcctggtgagcctgtttacaggacgcagacgtccttaggcggcccgcgatgcgggcgatactgaagcctaagcatttttactgacacgtcatcttacacaaagccagtcctgaggactggctttcgcggtttaagcggcgggcaaattgcgttaccttgtcaggagaagatcaatcgaacaggaaagcagggtggggcaacgcattcccgtcacgctgggcaatatcgccccgctggcggttaaacccttccgaccaggcaagctggcgctggtatgcgaaggcggaggacagcgagggatttttactgccggggtgctggacgaatttatgcgcgccggatttaacccctttgacctgatgctgggtacttcagccggtgcgcaaaacctctccgcctacatgtgtaatcagcaaggctatgcccgcaaagttatcacccgctacaccacttcacgccagtttttcgatccgatgcgctttgtgcgcggcggcaaccttatcgatctcgactggctggttgaggccacttcgcagcaaatgccgcttgccatgaactatgccgaagcgcagttcgcgttggggaaagagctgtggctatgcgcttgccgcggtgacgattactccgccagctatttttcgccgacgccgcaaacgtggctggatctgatccgcgcctccagcgccatccccggcttttatcgcagcggcgtgttgctcgacggcgttagctacctggacggcggcgtcagcgatgcgatcccggtgcaggaggcggcccgccgcggcgcccagaccatcgtggtgatccgtaccgtcccttcgcagatgttttataccccgcagtggttcaagcggatggagcgctggctgggagagagtagtctgcaaccgctggtcaatttggtgcatcatcacgaaaccacctaccgcgccatccagcagttcatcgagaaaccgccgggtaagttgcggatcttcgaaatctatccgcagcggccgctgcgcagcatggcgcttggcagccgactaccggcgctgctggaggactacaaaaccgggcgccagtgcggccgttatttcctggcaacggtgggtaaactactggccgaccagccgccgctgctgcgccacgcgccgcgtattgcccggcccgcgccggtggtggtgccgccggtgccggtggccaatgaagcgccccaggcgaccatcattcctgcgccccaggcgaatgaccccagttttgatcatgaggatctggcgtgacgcaccgttttatcgatacccactgtcactttgattttccccccttcgcggcagatgaggtcgccagcctggcgcgtgcggcgcaggccggcgtcgagcgaattatcgttccagccatctctgctgagcgttttagccgcgtgctgacgctggcagctcagcacgaagcgctgtacgccgcgctgggtatgcatccgatcgtcatcgaagagcatactgatgagggactggcgcagctggaagccttgatggcgcagcggccgcctaaactggtggcggtgggagagattggcctcgatctttatcgcgacgatccgcagtttgatcgtcagcaggcgctgctggaagcgcagctgaggctggcgaagcgttacgatctgccggtgatcctccactccagacgcacccacgataagctggcgatgctgctgaaaaaacatgccctgccgcgtaccggagtcatccatggctttgccggcagcctgcagcaggccgagcgcttcgttcagcttggctataagatcggcgttggcggcaccattacctatccccgcgccagtaaaacccgtgaagtgatggcgcgtctgccgctttccgctctgctgctggagaccgatgcgccggatatgccgctaaatggctttcagggacagcccaatcgaccggaacaagctgcacgggtatttgaggcgctgtgtgaactgcgtccggagtcgccggcagccatagaagaagggatcatgcacaatacgctcgccttgttttcccttcccccggtctctgtatggtgatcgatttctcataattgtccatccatatcattgatttgcttaaaatgtgtgaagccagacgggcaggatagtttcaggccgatataatcacgcggttagtactggactatcaaaaacacagggaatctgtatgcaaatcctcatgggacttatcggcatggtggcgctattggccattgctgtgctgctctccaataaccgaaaagccattaacctgcgcaccgtgctcggcgcctggataatccaggtgggtatcggcgcgttaatattgtatgtaccggccgggcgcgcggcgctattagcgatgtcgaatggcgtcgccagcgttattgcctacggcaatgaagggattagtttcatcttcggcgggctggtctccgataaaatgttcgaggtgtttggcggcggcggcttcgtctttgccctgcgcgtgctgccggtgatcgtcttcttctcgtcgctgattgccgtgctttactacctgggcattatgcaactggtcattcgcattctcggcggcgcgctgcgggcagtgctgaagacctcacgtaccgaatcgctgtcggccacggcgaacatctttgttggccagaccgaagcgccgctggtggtgcgtccttatatcgccaccatgactcgctcggagctgtttgcggtcatgtgcggcggcctggcctcggtggcgggctcggtactggcgggctatgcgcagatgggcgttccgctggagtaccttattgccgcgtcgtttatggcggcgccgggaggcctgctgtttgccaaaattatcgtaccggaaacggaaaaaccggacgataacccggctcatgacagccaaagcgctgacgcggataaaccggccaacgtgctggatgccgccgcctccggcgccgcgtctggtatgcaactggcgctcaacgtcggcgcgatgctgctggcgtttattgcgctgatcgccctgctgaacggcatactctccggcgtcggcggctggtttaaccatcctgagctgtcgctgcagatgatcctcggctggatcttctcacccctggcgtgggtgattggcgtgccgtggcacgaagcgacggtggcggggtcgtttatcggccagaagctgatcattaacgagttcgtggcctacatgaactttggcgaatatttaaaggcggatgccgaagtggcggcggccgggctgcaggtcatttcagatcacaccaaagccattatctctttcgcgctgtgcggctttgccaacctgtcatcgatcgccattctgattggcggactcgggggaatggcgcccaaccggcggcaggatatcgctcagcttgggctacgtgcggtagcggcggggacgctatccaacctgatgagcgccaccatcgccggggtttttctcgccctgtaagcctgtctcctgaaccagcggccaccgtgccgctggtgttgctgtaaatgtgataattccatcaccactctcttttttgaaaaatagtttatatttcaatttgtagcgttttaattgcccgtaaattgggcaaaatgtgcgccacgctatcgagtgtaattgttattgtgtgttagaattatcacatcctcatcggcggcgtggtatctattatgcttaagaggggactaacgataattgctacggtattgagtggtaatttgtgattttaatcacgttacagtaatgcaaattcgtaagtagttttcattaactgtgatgaatgtcgaagtgtaacgacgagcgaatgttacaatagtaacagactcgcaaggtgaacaaactattgatccggcacgacgccggcggagtatgaaatgactgatttaaaagcaagcagcctgcgcgcgttaaaactgatggacctgaccactctgaatgacgacgacaccaatgagaaagtcattgccctgtgtcatcaggcgaaaacgccggtgggtaacaccgcggcggtctgcatctacccgcgcttcatcccgatcgcccgtaaaacgctgaatgagcaggggacgccggatattcgcatcgccacggtcaccaacttcccgcacgggaatgacgatatcgacattgcgctggcggaaacccgcgcggcgatcgcttacggcgctgacgaagtggacgtggtcttcccgtaccgcgcgctgatcgccggcaacgagcaggtcggtttcgagctggtgaaagcctgtaaggaagcctgtgcggcggctaacgtgctgctgaaagtgatcatcgaaaccggtgagctgaaagaagaagcgctgatccgtaaagcgtctgaaatctctatcaaagccggggccgatttcatcaaaacctcgaccggtaaagtgccggtaaatgccacgccggaaagcgcgcgcatcatgatggaagtgatccgcgatatgggcgttgagaaaaccgttggcttcaaaccggcgggcggcgtgcgcagcgcggaagacgcgcagcagttcctggcgatcgctgatgaactgttcggcgccgactgggccgattctcgtcactatcgttttggcgcatccagcctgctggctagcctgttgaaagccctgggtcacggcgacggcaagagcgccagcagctactaatcccttgatttgccggatggcgctgcgcttatccggcctacgaattgatgcctgtaggccggataaggcgctcgcgccgtcatccggcaatttattctctttgggaggttaccgtgtttctcgcacaagaaattattcgtaaaaaacgtgatggtcaggcattaagcgatgaagagatccgctttttcatcaacggcatccgcgacaatactatctctgaagggcagatcgccgcgctggcgatgaccatcttcttccacgatatgtctatgccggagcgcgtttcgctgaccatggcgatgcgggattccggtaccgttctggactggaaaagcctcaaccttaacggtccgatcgtcgataaacactctaccggcggcgtcggggatgtcacttcgctgatgctggggccgatggtggccgcctgcggtggttacgtaccgatgatctccggccgcggcctcggccataccggcggtacgctggacaaactggaagcgatcccgggcttcgatatcttcccggacgacaaccgcttccgcgagattataaaagatgttggcgtggcaattatcgggcagaccagctcccttgccccggccgacaaacgtttctatgccacccgcgatattaccgcgacggtggactccatcccgctgattaccgcctcgattctggcgaagaagctggcggaagggctggatgcgctggtgatggacgtcaaagtcggcagcggcgcctttatgccgacttatgaactctctgccgcgctggccgaagcgatcgtgggtgtcgccaacggcgccggcgtgcgcaccaccgcgctgctgaccgatatgaatcaggtactggcctccagcgccggcaacgccgttgaagttcgcgaagcggtgcagttcctgaccggcgaatatcgcaacccgcgcctgttcgacgtgacaatggcgctgtgtgtggaaatgctgatctccggcaagctggcggcggacgatgccgaggcgcgcgcgaagctgcaggcggtgctggataacggtaaagcggcggaagtgtttggccgcatggtcgcggcgcagaaagggccgagcgactttgtcgagaattatgctaattatctgccgacggcgatgctgagcaaagcagtctatgctgataccgaaggttttatcagcgcgatggatactcgcgcgctgggcatggcagtggtttctatgggcggcggccgccgtcaggcatcggacaccattgactatagcgttggctttaccgagatggcgcgtctgggtgaccgcgtcgacggacagcgtccgctggcggtgatccatgccaaagacgagaacagctggcaggaggccgcgaaagcggtcaaagcggccattaaactggacgataaagccccggaaattacaccgacagtctatcgccgtatcactgaatagcgatatactgatctgatcgcttttttgcagcgcaagatgtatggagaacaagatgaaacgtgcatttatcatggtgctggactcctttgggattggcgcaacggaagacgcagaccgctttggcgacgtcggcgccgatacgctgggccacattgcagaagcctgcgccaaaggcgaggctgaccacggccgcaaaggcccgctgaatttaccgaacctgacccgtctgggtctggtgaaagcgcatgaaggctccaccggtaaaattgccgcgggtatggatggcaatgccgaagtgattggcgcctatgcctgggcgcatgaactttcttccggtaaagataccccgtccggccactgggaaatcgccggcgtgccggtgctgtttgactggggctacttcagcgaccaggaaaacagtttcccgcaggagctgctggataagctggtgaaacgcgccaacctgccgggctatctcggcaactgccactcctccgggacggtgatcctcgatcagctcggcgaagagcatatgaaaaccgggaaaccgatcttctatacctccgctgactcggtgttccagatcgcctgccacgaagagacctttggcctcgacaagctgtatgagctgtgcgaaatcgcgcgtgaagagctgaccgaaggcggctataacattggtcgcgtgattgctcgtcctttcgtgggcgacaaagccggtaacttccagcgtaccggtaaccgtcacgacctggcggtagagccgccggcgccgaccgtgctgcagaagctggtcgacgagaaaaacggccacgtggtgtccgtgggtaaaatcgccgatatctacgccaactgcggtatcactaagaaagtgaaagccaccgggctggacgcgctgttcgacgcgaccatcaaagagatgaaggaagcgggcgacgagactatcgtcttcactaacttcgtcgattttgactcctcctggggccaccgtcgtgacgtcgctggctacgcggcgggtctggagctgttcgaccgccgtctgccggagctgatggagctggttggtgaggacgacatcctgatcctcaccgccgaccacggctgcgacccgacctggactggtactgaccacacccgcgagcatatcccggtgctggtgtacggcccgaaagtgaaaccaggttcgctcggtcaccgtgaaaccttcgcggacatcggccagactattgcgaaatactttggtacgtctgacatggaatatggcaaagccatgttctgaggtcattgcccggtggcgcacagcgatccgggcctacgatttgtaggccgggtaaggcgtagccgccacccggcaaaaacaacaatgtaaaaggaactgaagatggcaactcctcacattaacgcagaaatgggcgatttcgctgacgtcgttttgatgccgggcgacccgctgcgcgcgaagcacattgcagaaaccttcctcgaagacgtgcgtgaagtgaacaacgtgcgcggcatgctgggcttcaccggtacctataaaggccgcaaaatctccgtgatgggccacgggatgggtatcccgtcctgctctatctacaccaaagagctgatcaccgatttcggcgtgaagaaaatcatccgcgtgggatcctgcggcgcggtgcgtgaagatgtcaaactgcgtgacgtggtgatcggcatgggcgcgtgcaccgactctaaagtgaaccgtctgcgtttcaaagaccatgattttgcggcgattgccgatttcggcatggtgcgtaatgcggtagacgcggcgaaagcgctgggcgttgacgcgcgcgtcggcaacatcttctccgcagacctgttctatacgccggacccgtccatgttcgacgtgatggaaaaatacggcattctgggcgtggaaatggaagcggcgggtatctacggcgtggcggcggagttcggcgcgaaagcgctgaccatctgcaccgtctccgaccacatccgtacccacgagcagaccactgccgctgaacgtcagaccacgttcaacgacatgatcaaaatcgcactggaatccgtgctgctgggcgataaagagtaagagctgttgtgccgggtggcggcttcgtctgacccggcctacggttttccaggcccgctaagcgcagcgggcttttttatcagcgcactgcgccggcaatccacgccgacagttctttcagttccgcttcctgctccgggaaatcgccgaccagcgcctcgcactgctgctgtaatacttctgcccgatactgacagccgactaagcgtgccgccagggcctccagcggcgccgggttcaggctatcggtaaaggcctgcgcgcgggtgatatgccctttttcgacgtcaaaatgcagctcaacgccgccccagcgaaagcgctcgtccagaagatgagagaaggccggcgcctggccgaagttccactcccagctgctctgacgggcgaatgtctcagcaaaatttggtagatccggcgtgttgtccggggagatcacctcggcgtccacccgttcgccgtaatggctgaagaatgcttcctggatcgcctcgcaaacttgctgatgggtaatgcccggcagcagctcaaccaggttcgccacccgtccgcgcaccgaggtaatgcctttagcctgcagctttttctggtccgggttgaggtagttggcgagacggcttaaatcggcgttgagtagcagggtaccgtgatgaaaaccgcggtccatggtttcacgataggcggagccggagactttgcggtcgccgctgtcggttttgaccaccagatcgttgcgcccggaggcttcggcggttacgccgagtgaattaagcgccgccagcacaatagcggtggagacggttttgtcgtactccggtttgcctgccataaaggtaaagcaggtattgccgaggtcgtggaacaccgcgccgccgccgctgctgcgacgggccagccgcacatggtcttcctccatgcggcgggtattacactccttccacgggttctgcgcgcggccgatgaccacggtatcggcattgcgccacaggaacagcacccgctgggtggcgggcatctggcggaaaatgcactcctcgaccgccaggttgaaccacgggtcgtaagagtcagagagcaggaggcgcaatgtggacattatagatttcctttcttttcatcgtcttcatcctcaaccggcttgttggcggtgagcaggaagggcgattgctgccagcgggtgcgtttgccctgcagcagcgtgcgggtcagcaccacgccgatagccagggacagcaacagcatcaggcgtaagatattggtggtattatccacctgcttcgcctcggtcgccagggtatgagtatcgagggtcagacgcaggtagcccagcgggccgttttttcctggcaccggttcgacaatctgctggttgaagtagccgccggcttttttaccatccagcgccagccggtcgcgaacctcgacgctttcgccagagcgcgccaccaggtcgccctgttcgtcatataccccggcgtccaggacgcggctgttatgggttagctgggtcaacagctgattgatgcgcttctcgtcaggcgtctcgctgcgcatcagcggcgcgagattcagcaccacctgctgcgccagcgtgcgggccagctcttccagctgcggattgcgttgtttctgactgttctgactgaaccacgaagcgccctgcatcagcgcgacgagtagggcgagacagataagaacaatgaccgcacgatgcagccggaatttcagttttgcgcgaaccatattccacctttgaaaatttgcagcttaatgttgccagaagcgctggttacaaggtagcctcatgcgttattttcctcgcctgaatgaagagatgtggagccgtaatgcctaacagtttgacctggtgcgacctgcctgaagacgtttccctgtggcctgggttgccgctttccctgagcggcgacgaggtcatgccgctggattatcacgccgggcgcagcggctggctgctgtatggtcgcggtctggataaacgtcggctgacggcgtggcagcgtgagctgggcgccgcgttagtgatcgttgcctcctgggtggtcgaggattaccaggtgatccgcctggccggttcgctgactccccgtgcgacgcgactggcgcatgaggcggggctggacgtcgcgccattgggtaaaattccccatttgcgcaccccgggcctgctggtgatggacatggactccacggcgattcagatcgaatgcatcgatgagatcgcgaaactggccggcaccggcgagctggtctcggaagtgaccgagcgggcgatgcgtggcgagctggacttcaccgccagcctgcgccagcgcgtggcgacgctgaaagacgccgatgccagtattttgctgcaggttcgcgacgcgctgccgctgatgccgggcctggcgcagctggtgctcaagctggaaacgctgggctggaaagtggcgatcgcctccggcggtttcaccttctttgccgagtatctgcgcgacaaactgcatctcgacgcggtattcgccaatgagctggagatccgcgacggcaagctcaccggcaacgtgctcggcgatatcgtcgatgcgaaatataaagccaatacgttgcgcaagctggcggaaaagtatgagatcccaacggcgcaaaccgtggctatcggcgatggcgccaacgacctgccgatgattaaggcagcagggcttggcatcgcctatcacgcgaagcccaaagtgaatgaacaggcggaagtgactatccgccacgctgacctgatgggggtattctgtattctctcgggcagcatgaaccaaaagtaagaggtaaacgtggcgaaagctccaaaacgcgcatttgtctgtaatgaatgtggtgcggattatccgcgctggcaggggcagtgcagcgcctgccatgcctggaacaccatcaccgagatgcgcatcgccgcgtcgccgcaggtggcgagaaacgagcgtctttcaggctatgccggtaacgccggcgtgtcgaaggtgcagaagctgtcagatatcagcctggaggcgctgccgcgtttctccaccggctttaaagaatttgaccgcgtgctgggcggcggcgtggtgccgggcagcgcgatcctgattggcggcaaccccggcgcgggcaaatcgacgctgctgctgcaaaccctctgcaaactggcggaagggatgaaaaccctgtacgtcaccggggaggagtccctgcagcaggtggcgatgcgcgcccatcgtctcgggttgccaacggccaacctgaacatgctctcggaaaccagcattgagcagatctgtcagatcgccgatgaagaaaagccgcagctgatggtgatcgactccatccaggtgatgcatatggccgacgtgcagtcgtcgccgggcagcgtcgcccaggtacgggaaaccgcggcctatttgacgcgctttgctaaaactcgcggcgtggcgattgtgatggtcggccacgtcaccaaagacggctcgctggccggtccgaaggtgctggagcactgtatcgactgctcggtgctgctggacggggatgccgactcccgcttccgtacgttgcgcagccataaaaaccgctttggcgcggtgaacgagctgggcgtcttcgccatgaccgagcagggcctgcgtgaagtgagcaacccgtccgctatcttcctcagccggggagatgaaatcacctccggtagctcggtgatggtggtctgggaagggacccgcccgctgctggtggagatccaggcgctggtcgatcactcaatgatgtccaacccgcgccgcgtggcggtggggctggaacagaaccgtctggcgatcctgctggcggtgctgcaccgtcacggcggcctacagatggccgatcaggacgtcttcgtcaatgtggtcggcggggtgaaggtcacggaaaccagcgccgacctggcgctgctgctggcgatggtctccagcctgcgcgaccgtcctctgccgcaggatctggtggtctttggcgaagtggggctggccggggaaattcgcccggtaccgagcggtcaggagcgtatctccgaagcggcgaagcacggcttccgccgcgccatcgtcccggcggccaatgtgccgaaaaaagtgccggaaggcatgcaaatctttggcgtgaaaaagctttcagacgcgctaagcgtttttgacgacttataataagttaaaaggagattagcgatgtcgtcatttgactatttaaaaagcgccattaagcagaaaggctgtaccctgcagcaggtggcggaagccagcggaatgaccaaggggtatcttagccagctgctgaatgccaaaatcaaaagcccgagcgcgcagaagcttgaagcgctgcatcgtttcctcgggctggagtttccccgccgacagaaaagcgtcggggtggtgtttggtaagttttacccactgcataccgggcatatctacctgatacagcgcgcctgtagccaggtcgatgagctgcatatcattatgggctatgacgatacccgcgaccgcgagctgtttgaagagagcgccatgtcgcaacagccgacggtgcctgaccgcctgcgctggctgctgcaaacctttaaatatcagaagaatattcgcatccacgccttcaatgaagaggggatggagccctatccgcacggctgggacgtctggagccatgggatccgcgcttttatgagcgaaaaagggatcgagccgaaccggatctatacctcggaagaggccgatgcgccgcagtaccttgagcatctggggatcgagacggtgcttatcgatcctaagcggacctttatgaatattagcggcgggcagatccgcgagaacccgttccgctactgggaatatattccgacggaagtgaaaccgttctttgtgcggacggtggcgatcctcggcggcgagtcgagcggtaaatcgacgctggtcaataaactcgccaatatcttcaataccaccagcgcctgggaatatggccgggattatgttttttcgcatctcggcggcgatgagatggcgctccagtattcggattacgataaaattgcccttgggcatgcgcagtatattgattttgcggtgaaatatgccaacaaggtggcgttcatcgataccgacttcgtcagcactcaggccttctgtctgaagtacgagggacgtgagcacccgtttgtgcaggcgctgattgatgaataccgcttcgacctggtgatcctgctggagaacaataccccgtgggtggccgatggactgcgcagtcttgggagctcggtggatcgtaaagagtttcagtcgttgctggtatcgctgctgaaagagaacgagatcgaattcgtccatgtgaaggagtcggactacgatgcccggttcctgcgctgcgtcgagctggtgaaacagctgatgggcgagcaggggtaggtgctctgcgggctgtagccctcaccccaaccctctcccaatgggagagggagcaaacattaaaaaaggcaacttgcgttgcctttttgcgttttatttcgcgatacgtttgtacttgattcgcttcggctccagcgcgtcggcgccgagagtgcgtttcttgtactcttcgtactcggtaaagttaccttcgaagaactcaaccttaccttcatcctggtaatccagaatgtgggtggcaatacggtcaaggaaccagcggtcgtgcgagataaccatcgcgcagcccgggaactccagcagggcgttttccagcgcgcgcagggtttcgatatccaggtcgttggttggttcatcgagcagcaggacgttaccgccaacctgcagcagtttcgccaggtgcagacgaccacgttcaccgccggacagctcgccaacgcgtttaccctggtcgacgcctttgaagttaaagcggcccacgtaggcgcggctcggcatctcggtgttgccgatcttcatgatatccaggccgccagacacttcttcccacacggtcttactgttgtccatcgcgtcgcggaactgatcgacggaagccagcttaacggtttcacccagggtgatggtgccggaatcaggctgttcctggccagacatcatgcggaagagggtggatttacccgcgccgttcggaccgatgatgccgacgatagcgcctttcggtaccgagaagctcagatcgtcaatcagaacgcggtcgccgtaggatttgcgcagatggctgacttccagaactttatcgcccagacgcgggcctggcggaatgaacagttcgttagtttcgttacgtttctgatattcaacgttgttaagctcttcaaagcgcgccaggcgggctttgcccttagactgacggcctttcgcgccctggcgaacccactcgagttctttctcgatagatttgcggcgtgcggcttcctgagaagcttcttgcgccagacgctggtctttctgctccagccaggaggagtagttgccttcccacggaataccttcgccgcggtcaagctcgaggatccagccggcgacgttatcaaggaagtaacggtcgtgggtaatcgccaccacggtgccttcgaagtcgtgcaggaagcgttccagccaggcgacggactcggcgtcgaggtggttggtcggttcgtcgagcagcagcatatccggtttttccagcagcagacggcacagcgcgacgcggcggcgttcaccaccggaaagattagcgattttcgcatcccagtccggcaggcgcagggcgtcggccgcgcgctccagctggacgttcaggttgtggccgtcgtgcgcctggataatctcttcgaacttgccttgctgtgcggcaagcttatcgaagtccgcatccggctcggcgtatttggcatagacttcgtccagacccttcagcgcgttaaccacttcggcgaccgcttcttccacggactcgcgcacggtgtgctccgggttgagctgcggctcctgcggcaggtagccgattttgatgccgggctgcggacgcgcttcaccttcgatctcggtgtcgataccggccatgatgcgcagcagggtagatttaccggcgccgttcagaccgagcacaccgattttcgcgccagggaaaaagctgagggagatatttttcaaaatatgacgtttcggcggaaccactttgccgacacgatgcatggtataaacgaattgagccacgttggacttcgcctctttctattttgatagatagttcaaagccgaagtgtagcctttttcgcgcgctaatcccagcgaggcgacaggattcacagaagcgtaaaaaaatgtccaggacatggcgcgtttagcgttgtctgattagcataagtaaagccgcctgccgaaccggcaggggtttttaagcggcacgatgctgcgaaaatgcaccggaaagaggaagagcttgtggaaaaagccaaaaaaatggcgtggcatcttttggctgccagcgttggtttgttgacgttgagtcagctggcgcatgcggattcactggatgaacagcgcagccgctacgcacaaattaagcaggcgtgggataaccggcagatggatgtagtcgaccagctgatgcccacgttaagcacctatcccctgtatccctatttgcagtaccgacagatcaccgacgatctgatgaaccagccggcgctggtggtgaaaaactttattgacgccaatccgacgctgccccctgcgcgttcattacgttcgcgcttcgtgaatgaactggcccggcgcagcgactggcgcggcttgctggcgtttagcccggataagccgaccagcaccgaggcgcagtgcaactattactacgccaagctgagcgtgggacagtcgcaggaggcctggagcggggcgaaagagctgtggctgacgggcaagaatcagcccggcgcctgtgaaccgctgttcagcgcctggcgcgactccggtcagcaggatccgctggcatatctcgaacggatccgcctggcgatgaaggccggcaatatcgggctggtgaaatcgctggcccagcaaatgcccgccaactaccagagcatcgccagcgccgtggtcgccctggctaacgatccaaacagcgtcctcaccttcgcccgcaccaccggggcgacggactttacccgtcagatggccgccgtcgccttcgccagcgtcgcccgccaggacgtggaaaatgcccgcctgatgatcccttcgctggtacaggctcagcagctcaatgaggatcagacccaggaactgcgcgatattgtcgcctggcgcctgatgggtagcgatgtaaccgaagagcaggccatctggcgcgatgacgcaatcatgcgttcgcagtccacgccgctggtggagcggcgggtacggatggcgttggggacgggcgatcgccatggcctcaacacctggctggcgcgcctgccgatggaggcgaaagagaaagacgaatggcgctactggcaggcggatctgctgctggagcgcggcagggatgaggaggcgcaggcgatccttcgctcgttgatgcaacagcgaggcttctacccgatggtcgccgcgcagcgtcttggcgaggagtataccttccgcatcgataaagcctcgggcaccatcgatccggcgctggcctccgggccggagatggcgcgggtacgtgagctgatgtactggaatatggataacaccgcgcgcaccgaatgggccaacctggtcactagtcgcaccaaatcccagcaggcgcagctggcgcgctatgccttcgatcagcactggtgggatctgagcgtgcaggcgacgatcgccggtaagctgtgggatcagctggaagaacgtttcccgctggcctataacgacctgtttgcccgctatgttagcggcaaagatattccgcagagctacgcgatggcgattgcccgtcaggagagcgcctggaacccgaaagtgcgctcgccggtcggcgccagcgggctgatgcagattatgccgggcaccgcgacgcataccgtcagtatgttcagcattcccggctacagcggcccgtcgcagctgttggatccggaaaccaacatcaacatcggcaccagctatctgcagtacgtttatcagcagttcggcaataaccgtatctacgcctcagcggcctataacgccgggccgggccgggtacgcagctggcaggggaacagcgccggacggatcgacgccgtggcgtttgtcgagagtattccgttttcggaaacccgcggctacgtgaagaatgtcctctcctatgacgcctactaccgctactttatggggcagcaggataagatcctcagcgatgcggagtggcgccagcgttactgatcgccgggaagtatgttatgctttgtactcgttgaagagtacattcgacgggcagcgtaagctgcccgtctcaatatggtggcgcgatatgacccaacaatctccctattccgcggccgttgccgaacaacgtcatcaggagtggctgcgctttgttgccctgcttcagcaggcctatgctgaggatctgcatctgccgttgctgcagctgatgctgacgcccgacgagcgcgaagccctgggtacccgggtgcgcattatcgaagagttgctgcgcggcgagatgagccagcgtgagctgaaaaatgagctcggcgccggaattgcgaccattacccgcgggtcgaacagcctgaaatcggcgccggtagagctgcgccagtggctggagcagacgctgctggctagcgataaatagcgttatggaacgggcttagcgccagcacgaccgcctggtggtaaacgctgctgcgggttaatctgccgccggtgaaaaccccaatcgccccctctttacgaccgatctgatcgatgccggtatactgcgacatgaccgggccgagggcttcgccagcgcgaacctgctcaagaataacgtcaggcaacggcagcgtggctgagcgcgcttctccgcgctggctggcgctttcgatgaccacccagctaaaggtgctgtcatcgtcgataccggcttcgatagctacccagaaatcggcatttggccgggcaaggcgcgcattggcgacgcgatttcgtgcgccagcgcgcgtttcctcgctgccgaagggctgttccggcacgccgctctcgacggcgacggactcaatgtggcaggatccttcgccgaaaatctcgtcaaaagcctgcagaattgcctgaattttggcgggattagtggtcgctgagacaacatggtgcataatcaaaacaactcagaataaactaacgtcatcgcagtatactctaaatcaccccgagggcaggcggtaatgcccgaaagcggttgataacgagtccagaacggaaaaaaagcatgttacaagtataccttgttcgccacggtgaaacgcagtggaacgccgagcgacgtattcaggggcagtccgacagcccgctgaccgcccatggtgagcgtcaggcctggcaggtgggcgagcgcgccagaacgctggggatcacccatatcattaccagcgatctggggcgaacccgccgcacagcagaaattatcgccgaagcctgcggctgcagcgtgatcgccgatgcgcgcctgcgcgaactggatatgggggtgctggagaagcgccatatcgactcgctcagcgaagaagaagaaggctggcgtcgccagctggtcaacggcacaccggacggtcgtattccgcagggcgaatcgatgcaggagctcagcgagcgtatgcatgcggcgctggcatcctgtctggaattacccgccggtagccggccgctgctggtgagtcatgggatcgcgctgggctgcctggtgagcacgatattagggctgccggcgtacgctgagcgtcgtctgcggctgcgcaactgctctatttcgcgcgtcgactatcagcaaagcccgtggctggcttccggctgggtggtggaaacggcgggcgacgtctcgcatcttgacgcccccgcaatggacgagctgcagcgttaacggcggatcgggatcagatactcgcagcgcaactgaatcggcgtggcctgatcccggctttcatcttcagggtagaagcgttcaatatccagccccttgcgacgcgtcaggttcagcatcggcatgcaggtgccgtagacggtcaggatgaattcctgcagaccggtacccagcccttcatacgtaaacatgacatactcgccgccctccagggtcactggatgggcatgctgcaggtggccgttagccatctccggcgtcagcgcggtggtatagaatacttcctgctcatcgtctttttccaggctcggacgcggctcatgcagcccgtagagcaccggggggattgacggtgagttgccgaggaagtctcgccagaactggacccgcatctggttacgaaaatcggagatttcctcgagcttacaggtatagctctgggtcacgccaagcagctgagtagggggcagagtgataaactcatgtttcggcagggtaaattcgccaagacgcagcggcgggcgcataccgaacgagctccagtccggcgagcggcggtagagcgccggcgtcagcgagaattgcttcttaaacgctcgggtgaaggtctgctgggagtcgaaacggtactgcagcgcaatatcaaggattggacgggcggtcaggcgtaatgcgacagcagatttcgacaagcggcgcgcgcgaatataggcaccgatggcatggccggtgacatccttaaacattcgctgcaaatgccacttggaataacctgccttcgccgccacattatccagagaaagcggctgatccaggtgaccttccagccagctaaggagatcgcgaataatccctgcttgatccataaaatgtccccatccttaaacacaggtgcctgatattaaagtagcggataatagcattttttgatgttttagcattcagtgttttttttgcttttaaatgcggtaggtcaggggatttgaacgataattttgtaaagctgtgatctataaaccttttctgctaagtgcgtgataatcactcagctatattttttaataatggtaacaatatgaaatacaagaagtttgcgatggggctgctcctgctgagcggtagccagctggctcaggcggagcagattggttccgtggatacggtcttcaaatggttagggccggatcacaaaatcgtcgtcgaagcctttgacgatccggatgtacagaacgtgacctgctatatcagccgggcgaaaaccggtggcatcaaaggcgggctggggctggcggaagatacctctgacgcggcgatttcctgccagcaggtcgggccgattgagctaacggacaaaatcaaaaacggcaaaagccagggcgacgtggtgttccagaagcgcacctcgctggtgtttaaaaaactgcaggtcgtgcgtttctatgatgcgaagcgcaatgcgctggtctatctgacctactcggataaagtggttgatggctcgccgaagaacgccatcagcgccgtgccgatcatgccatggaataaataaacgggagcgcgcatgcagcagccacggatttggttagttgaggatgaacagagtatcgctgataccctggtttacatgctgcagcaggagggcttccaggtcagcgtctttggccgcggtttgcccgcgctggaggcggcggcgcatcaggcgccagatgtcgccatcctcgacgtcggcttgccggatatcagcggcttcgagctctgtcggcgtctgctgacgcgttatccggcgctgccggtgctgtttttgacggcgcgtagcgacgaggtcgataagctgctggggctggaaatcggcgctgacgattacatcgccaagccgttttcaccacgcgaagtctgcgcgcgggtgcgaaccgtgctgcggcggctgcagaagtttgccgcgccatcgccggtggtacgcgtcggcgagtttgtgctcgatgagcaggcggcggcgatcagctggttcggccagccgctgaatctgacgcgctacgaatttctgctgttgaaaaccctgcttcacgcgcccggtcgcgtcttctcccgtcagcagttgatggagctggtgtggatcgatgcctgggaaagcctcgaccgtaccgtcgatacccatatcaaaaccctgcgcgctaagctgcgggctgtgaatcctgaaaaggcgccaatcaatacccatcgcggtatgggctacagcctggggcgcggctgatgcgtatcggcatgcgcctgctgctgggctattttcttatcgtcgcgatcgccgcgtggtttgtgctgtcgatctttgtccaggaagtgaagccgggcgtgcgccgggcgacagaggggaccctcaatgataccgctaccctgttggcggcgctggcgcgtgaggatctgctggcggcaaacccgcagcagggcaggctggcgcaggcctttcaccagctcaaccagcagccgctcaacgccaatattggcggaattaaaaaggtacgtaatgagtaccgcgtctatctgaccgatgcccggggcaaggtggtgtttgactccagcgggcaggcgacagggcaggactattcgcgctggaacgatgtctggctcaccctgcgcggccagtacggcgcgcgcagtacgcgcagcgatccgcatgatgaagccagctcggtgatgtatatcgccgcgccggtgatggataaggggcggattatcggcgtgctgagcgtcggtaaacccaacctggcgatgacgccggtcattaagcgcagcgagcggcggatcctctgggccggcggcgccctgctgggcattgcgctgttgattggcggcggcgtcgtctggtggatcaatttctctatcggcaagctggtgcgctatgcggactcggtgaccgctgagcgcccgctgccgctgccggaggttggcagcagcgaattgcgcaagctggcccaggctctggagagcatgcgggtaaagctcgaaggtaagaatgccatcgaaaactatgtctatgacctgacccatgaactgaaaagcccgctggcggccatccgcggcgcggcggagatcctgcgcgaagggccgccgcctgaggtggcggcgcggtttactgataatatcctcgcgcaaaacacccggatgcaactgctggtggagcggctgctccagcaggcgcgactggaaagccggctggagataaagcagcagccggtgttgatagatgcgctataccaacggctgacggaggagcgcaacatcgctctggcggcgaaagctatcaccctgcgctggcgggagagtgggatgctggtcaatggcgatggcgagctgctggcccaggcgctgggtaatctgctcgacaacgcgattgactttaccccccagggcggtgagatcgccctggctgcggagaagcgaaatgaagaggtgcaattgagcgttatcgacaacgggtgcggtattccggactatgccctggaacgaatctttgagcgattctattcgctgccgcgcgaagacggccataagagcagcggccttgggctggcgttcgttcgtgaagtcgcgcgcctgcatcacggcgatatcaatctgcacaatcggcccgaaggcggcgtggtcgccacgctgcgacttcaccgtcacttcacatagcttcaaattctccccacacagccgtcctattgtgaggccatcacgatagggagaaaggctatgttgaaatcaccgttattctggaaaatcaccacgttaataggctgtattgtgctgctatctttgccgttaatgatggtcagggagcttattaatgagcgagcggattatcgtagcgaagtggtggacgccattgagcaaagcaccagcggctcgcaaaaactcgccggaccgctgatcgctattccgataaccgagaccctgacccgcatggagaaccaaaaagaggtcaactatcagcggagctgggtgtattactggctgccggagtcgctggcggtcgccggcaaacagaccgtggagtcgaggagggtgggcatctacagcggccaggtctggcataacgccttgcagattaaggcctcgtttgatccgctgcgtctggcggcgctgagaaaaacgaatatcgtcttaggccagccgcggctggtggtgagcgtcggcgatgcccgcggcattggcgccatccatgccccggaggtcaacggtaacgtattaagcgtggagccggggctggggataagcggcgatggcgcaggtattcatatgccaatgcctgcgctggcggaggacaacaagccgcttgagattgccttttcactcgatctgaacgggacgggtgagttttcactggtgccgctcgggcgtaacagcgagctgcagctgaccagtaactggccgcatcccggttttctcggcagcttcctgccaacgcaacgggaagtgagtgctgccggctatcgcgcccactggcaaagcagctggttcgccaacgatatggggagctatttcaaggatgatatggagatcccgtggtcgcgactgccggcgttcagtgccgatgtgatgtcccttgccgaccagtaccagctaaccgatcgggcgacaaaatatgccatcctgttaatcgggctgacctttatggcttttttcgtgttcgagagcctgacccgtcgtcccctgcatccgatgcaatatctgctggtgggcttatcgctggtgctgttttacctggtgctgctggcgctctcagagcacattggttttaccgccgcctggctggcggccagcctgtctggcgcggtgatgaatgggatctaccttcaggcagtgctcagaggatggcgtaacagcctgctgtttgtcgccgcgctactgctgctggatggcgtgatgtggtttctgttgcattctgaggatagcgcgctgctgctgggtaccggggtgctggcgctggcgctgagcgtcctgatgtttttgacccgtcgcgtggactggtatgcgttatcgctgccgaaaggcacagtgcctccgacaccggctgccgatgacgataagctgcgtctctggaaagagtgacggcataaaaaacggcgcccctggggcgccgttttcgcatcatggctgcggaataaatcgtattattcctgcagatcgccacagaaacggtagccttcaccgtgaatggtagcgatgatttccggggtatccggagtggattcgaagtgtttacgaatccgacgaatggtcacgtcaacggtacggtcatgcggcttcagctcgcgaccggtcattttcttcagcagctcggcacgagactgaattttgcccgggttttcgcagaagtgcagcatcgcgcggaattcactgcgcggcagcttgtactgttcgccgttcgggctaaccagggaacggctgttgatatcgagttcccagccgttgaacttgtagctttccacgctgcgacgctcttcgctcacggtaccgaggttcatggtacgggagagcaggttgcgcgcgcggatagtcagttcacgcgggttaaacggtttagtgatatagtcgtcagcgccgatttcgaggccaaggatcttatccacttcgttgtcgcggccggttaagaacatcagcgcgacgtctgcctgctcgcgcagctcgcgcgccagcagaagaccatttttacccggcaggttgatatccatgatcaccaggttgatatcattttcagacaggatctgatgcatttccgcgccatcggtcgcttcgaatacatcgtaaccttctgcttcgaaaatactttttaacgtgttgcgtgttaccaactcgtcttcaacgataagaatgtgcggggtctgcatgtttgctacctaaattgccaactaaatcgaaacaggaagtaccaaagtccctgacctgcctgctgcatgtcgcaaattaacatgcgcggcgtaacatgactaaagtacgtaattgcgttcttgatgcactttccatcaacgtcaacaacatcattagcttggtcgtgggtactttccctctggacccgacggtgtcaaaaacggctgacatcctaaccattttaacagcaacataacaggctaagagaggccgaacacccaataaaactacgcttcgttgacatatatcaagttcaattgtagcacgttaacagtcttgtgaaatcattgcatcgccatgctctttatagtcacaatctttacccggctcaactagttgcgtggataaattaataaatacagtgaatccaaagcctgaaacgatgcatcagatgaaattgcattgcccatcatatggataaatgggttctgttaacatactccttgtcacggcctcctgagaacagtttagatttttttatgggtaagaaaacgcaattttagtgatttttgttgcaaatttgtaaattttcaccgcgtaaaatggggggcgctgcgcctcgataacgcctgagagagagaaagaaaccgcaatgcgtttaacgattattttagtcggtcctgcccgggccgagaacgtcggcgctgccgccagggcgatgaaaaccatgggatttcgcgaactacggatcgtcgatagcgaagcccacctggcgccgccggcacgctgggtggcgcatggctcaggcgacatcctcgatggtatcaccacctatcccacccttgccgaggcgctgcatgacgttgattttaccgtcgccaccaccgcccgcagccgcgcgcgttttcactattacgccacgccgcagcagctgttgccgctgctggaggagaaggcgcagtggatgaaccatactgccctggtatttggtcgtgaggacgccggattgaccaatgaggagctggcgctggctgatgtgttgaccggtgtgccgatggctgcggattatccgtcgctgaatctcggccagtcggtgatggtctactgttatcaattagcatcgctaatgcaacaaacggcgcccgccgccgctgcggcagaccatcatcagctgcaggccttacgtactcgtaccctggcgttactttcgcgtttgggcgtggaggatgatgccaaactggccgactggttgtcgcaacggctgggcctgctgcagcagcgcgacacggcaatgttgcatcgtttgctgcatgatattgaaaaaaacctgccagaataaaactctgtcatattttttatt
